(19) United States
(12) Patent Application Publication
(10) Pub. No.: US 2026/0062737 A1
(43) Pub. Date: Mar. 5, 2026

(54) SPATIAL BIOLOGY TOOLS USEFUL FOR DISEASE MONITORING

(71) Applicant: Singular Genomics Systems, Inc., San Diego, CA (US)

(72) Inventors: Eli N. GLEZER, Del Mar, CA (US); Michael LAWSON, Pasadena, CA (US); Kenneth Howard GOUIN, III, Oceanside, CA (US)

(21) Appl. No.: 19/318,081

(22) Filed: Sep. 3, 2025

Related U.S. Application Data
(60) Provisional application No. 63/690,740, filed on Sep. 4, 2024.

(51) Int. Cl. C12Q 1/6841; C12Q 1/6883

(52) U.S. Cl. CPC C12Q 1/6841; C12Q 1/6883; C12Q 2600/158

(57) ABSTRACT

Disclosed herein, inter alia, are oligonucleotide probes, methods, and kits useful for amplifying and detecting target nucleic acids in situ.

### CROSS-REFERENCES TO RELATED APPLICATIONS

[0001] This application claims the benefit of U.S. Provisional Application No. 63/690,740, filed Sep. 4, 2024, which is incorporated herein by reference in its entirety and for all purposes.

### SEQUENCE LISTING

[0002] The instant application contains a Sequence Listing which has been submitted electronically in XML format and is hereby incorporated by reference in its entirety. Said XML copy, created on Aug. 22, 2025, is named 051385-627001US.xml, and is 9,380,734 bytes in size.

### BACKGROUND

[0003] Inflammatory bowel disease (IBD) is a chronic autoimmune disorder, with ulcerative colitis (UC) and Crohn's disease (CD) representing the main IBD subtypes. Each malady is characterized by distinct patterns of chronic GI tract inflammation, with UC being primarily restricted to the colon and conferring an increased lifetime risk of colorectal cancer and Crohn's manifesting throughout the gut and frequently complicated by fistulas. Both diseases markedly impact quality of life. Disease flairs and resulting hospitalizations for complications, be they infectious or requiring of surgery, are frustratingly unpredictable. IBD is not static over time and varies through the GI tract. Although extensive endoscopic sampling (both spatially and across time) is part of routine clinical care, the low throughput, and thus high cost nature of existing platforms has made them simply impractical for use in large, well powered IBD clinical studies. This challenge has been compounded by the fact that most existing platforms track only one type of analyte (i.e. protein or transcript, thus increasing cost and sample requirements for being able to investigate both) and are not easily adapted to modest plexicity disease-focused applications. Users are often stuck using large, costly panels where most targets are irrelevant to the use-case. The high cost, low throughput, inflexible and awkward multi-platform nature of current spatial multi-omic technologies represent major barriers to the large scale translational studies needed to advance therapy development and patient care in IBD. Disclosed herein, inter alia, are solutions to these and other problems in the art.

### BRIEF SUMMARY

[0004] Described herein are aspects pertaining to methods of monitoring, detecting, and diagnosing a disease state, such as IBD, of a subject. Additional embodiments include methods and novel sequences useful for detecting IBD-associated biomolecules and in situ.

### BRIEF DESCRIPTION OF THE DRAWINGS

[0005] FIG. 1. Schematic of three different embodiments for detecting targets. Top: transcript counting; middle: direct-seq de novo RNA sequencing; bottom: protein detection.

[0006] FIG. 2A-2D. Spatial multi-omics data of a single 4×4 mm section of normal human tonsil. FIG. 2A. a fH&E™ image of the tonsil. FIG. 2B. An image of the tonsil section wherein 10 different proteins are detected. FIG. 2C. An image of the tonsil section wherein 153 different genes are detected. FIG. 2D. Detected transcripts overlaid on tissue section and differentiated by cell type classification.

[0007] FIG. 3. Schematic representation of a single padlock probe targeting TCRB RNA. Complementary sequences to the 3′-end of the FR3 and the 5′-end of the FR4 regions are indicated on the left and right, respectively. Reverse transcription from the 3′ end generates a copy of the CDR3 region. The asterisk indicates the ligation site. A primer, shown as an arrow in the upper right, may be used for initiating amplification. The 3′ end of the padlock probe (i.e., the sequence complementary to the FR4 region) may be used as a sequencing primer binding sequence. The T-Cell Receptor Beta (TCRB) RNA molecule is an essential component of the T-cell receptor (TCR) complex in the immune system. TCRs are pivotal for recognizing antigens presented by major histocompatibility complex (MHC) molecules on antigen-presenting cells. The TCR structure comprises various regions, including variable (V), diversity (D), joining (J), and constant (C) segments. Within the TCRB chain, specifically in its variable region, are the Framework 3 (FR3) and Framework 4 (FR4) regions. These framework regions are crucial in maintaining the structure and stability of the TCR. The FR3 region, located between the second and third complementarity-determining regions (CDR2 and CDR3), serves as a structural scaffold for the CDRs, which are directly involved in the antigen recognition process. This framework region contributes to the shape and orientation of the antigen-binding site. On the other hand, the FR4 region follows the CDR3 and is a part of the variable domain. FR4 plays a vital role in ensuring the structural integrity of the TCR.

[0008] FIGS. 4A-4C. G4X spatial multi-omics data of a single 4 mm punch of normal human colon. FIG. 4A. is the fH&E image, FIG. 4B. is the transcripts detected using a 155-plex colon specific panel. FIG. 4C. Image of the transcript-based cell type classification overlayed on fH&E.

### DETAILED DESCRIPTION

[0009] The aspects and embodiments described herein relate to systems and methods for analyzing a cell and cellular components (e.g., RNA transcripts, proteins, and/or biomolecule of a cell or tissue). Data obtained from the proteome and transcriptome is used in research to gain insight into processes such as cellular differentiation, carcinogenesis, transcription regulation, and biomarker discovery, among others. The methods provide significant advantages in terms of speed and detection efficiency of target polynucleotides, and may be performed on solid supports or in or on cells or tissue sections in situ.

### I. Definitions

[0010] All patents, patent applications, articles and publications mentioned herein, both supra and infra, are hereby expressly incorporated herein by reference in their entireties. The practice of the technology described herein will employ, unless indicated specifically to the contrary, conventional methods of chemistry, biochemistry, organic chemistry, molecular biology, bioinformatics, microbiology, recombinant DNA techniques, genetics, immunology, and cell biology that are within the skill of the art, many of which are described below for the purpose of illustration. Examples of such techniques are available in the literature. See, e.g., Singleton et al., DICTIONARY OF MICROBIOLOGY AND MOLECULAR BIOLOGY 2nd ed., J. Wiley & Sons (New York, NY 1994); and Sambrook and Green, Molecular Cloning: A Laboratory Manual, 4th Edition (2012). Methods, devices and materials similar or equivalent to those described herein can be used in the practice of this invention.

[0011] Unless defined otherwise herein, all technical and scientific terms used herein have the same meaning as commonly understood by one of ordinary skill in the art to which this disclosure belongs. Various scientific dictionaries that include the terms included herein are well known and available to those in the art. Although any methods and materials similar or equivalent to those described herein find use in the practice or testing of the disclosure, some preferred methods and materials are described. Accordingly, the terms defined immediately below are more fully described by reference to the specification as a whole. It is to be understood that this disclosure is not limited to the particular methodology, protocols, and reagents described, as these may vary, depending upon the context in which they are used by those of skill in the art. The following definitions are provided to facilitate understanding of certain terms used frequently herein and are not meant to limit the scope of the present disclosure.

[0012] As used herein, the singular terms “a”, “an”, and “the” include the plural reference unless the context clearly indicates otherwise. Reference throughout this specification to, for example, “one embodiment”, “an embodiment”, “another embodiment”, “a particular embodiment”, “a related embodiment”, “a certain embodiment”, “an additional embodiment”, or “a further embodiment” or combinations thereof means that a particular feature, structure or characteristic described in connection with the embodiment is included in at least one embodiment of the present disclosure. Thus, the appearances of the foregoing phrases in various places throughout this specification are not necessarily all referring to the same embodiment. Furthermore, the particular features, structures, or characteristics may be combined in any suitable manner in one or more embodiments.

[0013] As used herein, the term “about” means a range of values including the specified value, which a person of ordinary skill in the art would consider reasonably similar to the specified value. In embodiments, the term “about” means within a standard deviation using measurements generally acceptable in the art. In embodiments, about means a range extending to +/−10% of the specified value. In embodiments, about means the specified value.

[0014] Throughout this specification, unless the context requires otherwise, the words “comprise”, “comprises” and “comprising” will be understood to imply the inclusion of a stated step or element or group of steps or elements but not the exclusion of any other step or element or group of steps or elements. By “consisting of” is meant including, and limited to, whatever follows the phrase “consisting of” Thus, the phrase “consisting of” indicates that the listed elements are required or mandatory, and that no other elements may be present. By “consisting essentially of” is meant including any elements listed after the phrase, and limited to other elements that do not interfere with or contribute to the activity or action specified in the disclosure for the listed elements. Thus, the phrase “consisting essentially of” indicates that the listed elements are required or mandatory, but that other elements are optional and may or may not be present depending upon whether or not they affect the activity or action of the listed elements.

[0015] As used herein, the term “control” or “control experiment” is used in accordance with its plain and ordinary meaning and refers to an experiment in which the subjects or reagents of the experiment are treated as in a parallel experiment except for omission of a procedure, reagent, or variable of the experiment. In some instances, the control is used as a standard of comparison in evaluating experimental effects.

[0016] As used herein, the term “complement” is used in accordance with its plain and ordinary meaning and refers to a nucleotide (e.g., RNA nucleotide or DNA nucleotide) or a sequence of nucleotides capable of base pairing with a complementary nucleotide or sequence of nucleotides (e.g., Watson-Crick base pairing). As described herein and commonly known in the art the complementary (matching) nucleotide of adenosine is thymidine and the complementary (matching) nucleotide of guanosine is cytosine. Thus, a complement may include a sequence of nucleotides that base paired with corresponding complementary nucleotides of a second nucleic acid sequence. The nucleotides of a complement may partially or completely match the nucleotides of the second nucleic acid sequence. Where the nucleotides of the complement completely match each nucleotide of the second nucleic acid sequence, the complement forms base pairs with each nucleotide of the second nucleic acid sequence. Where the nucleotides of the complement partially match the nucleotides of the second nucleic acid sequence only some of the nucleotides of the complement form base pairs with nucleotides of the second nucleic acid sequence. Examples of complementary sequences include coding and non-coding sequences, wherein the non-coding sequence contains complementary nucleotides to the coding sequence and thus forms the complement of the coding sequence. A further example of complementary sequences are sense and antisense sequences, wherein the sense sequence contains complementary nucleotides to the antisense sequence and thus forms the complement of the antisense sequence. Another example of complementary sequences are a template sequence and an amplicon sequence polymerized by a polymerase along the template sequence. “Duplex” means at least two oligonucleotides and/or polynucleotides that are fully or partially complementary undergo Watson-Crick type base pairing among all or most of their nucleotides so that a stable complex is formed. Complementary single stranded nucleic acids and/or substantially complementary single stranded nucleic acids can hybridize to each other under hybridization conditions, thereby forming a nucleic acid that is partially or fully double stranded. When referring to a double-stranded polynucleotide including a first strand hybridized to a second strand, it is understood that each of the first strand and the second strand are independently single-stranded polynucleotides. All or a portion of a nucleic acid sequence may be substantially complementary to another nucleic acid sequence, in some embodiments. As referred to herein, “substantially complementary” refers to nucleotide sequences that can hybridize with each other under suitable hybridization conditions. Hybridization conditions can be altered to tolerate varying amounts of sequence mismatch within complementary nucleic acids that are substantially complementary. Substantially complementary portions of nucleic acids that can hybridize to each other can be 75% or more, 76% or more, 77% or more, 78% or more, 79% or more, 80% or more, 81% or more, 82% or more, 83% or more, 84% or more, 85% or more, 86% or more, 87% or more, 88% or more, 89% or more, 90% or more, 91% or more, 92% or more, 93% or more, 94% or more, 95% or more, 96% or more, 97% or more, 98% or more or 99% or more complementary to each other. In some embodiments substantially complementary portions of nucleic acids that can hybridize to each other are 100% complementary. Nucleic acids, or portions thereof, that are configured to hybridize to each other often include nucleic acid sequences that are substantially complementary to each other.

[0017] As described herein, the complementarity of sequences may be partial, in which only some of the nucleic acids match according to base pairing, or complete, where all the nucleic acids match according to base pairing. Thus, two sequences that are complementary to each other, may have a specified percentage of nucleotides that complement one another (e.g., about 60%, preferably 65%, 70%, 75%, 80%, 85%, 90%, 91%, 92%, 93%, 94%, 95%, 96%, 97%, 98%, 99%, or higher complementarity over a specified region). In embodiments, two sequences are complementary when they are completely complementary, having 100% complementarity. In embodiments, sequences in a pair of complementary sequences form portions of a single polynucleotide with non-base-pairing nucleotides (e.g., as in a hairpin or loop structure, with or without an overhang) or portions of separate polynucleotides. In embodiments, one or both sequences in a pair of complementary sequences form portions of longer polynucleotides, which may or may not include additional regions of complementarity.

[0018] As used herein, the term “contacting” is used in accordance with its plain ordinary meaning and refers to the process of allowing at least two distinct species (e.g., chemical compounds including biomolecules, particles, solid supports, or cells) to become sufficiently proximal to react, interact or physically touch. It should be appreciated, however, that the resulting reaction product can be produced directly from a reaction between the added reagents or from an intermediate from one or more of the added reagents which can be produced in the reaction mixture. The term “contacting” may include allowing two species to react, interact, or physically touch, wherein the two species may be a compound as described herein and a protein or enzyme.

[0019] As may be used herein, the terms “nucleic acid,” “nucleic acid molecule,” “nucleic acid sequence,” “strand,” “nucleic acid fragment” and “polynucleotide” are used interchangeably and are intended to include, but are not limited to, a polymeric form of nucleotides covalently linked together that may have various lengths, either deoxyribonucleotides or ribonucleotides, or analogs, derivatives or modifications thereof. Different polynucleotides may have different three-dimensional structures, and may perform various functions, known or unknown. Non-limiting examples of polynucleotides include a gene, a gene fragment, an exon, an intron, intergenic DNA (including, without limitation, heterochromatic DNA), messenger RNA (mRNA), transfer RNA, ribosomal RNA, a ribozyme, cDNA, a recombinant polynucleotide, a branched polynucleotide, a plasmid, a vector, isolated DNA of a sequence, isolated RNA of a sequence, a nucleic acid probe, and a primer. Polynucleotides useful in the methods of the disclosure may include natural nucleic acid sequences and variants thereof, artificial nucleic acid sequences, or a combination of such sequences. As may be used herein, the terms “nucleic acid oligomer” and “oligonucleotide” are used interchangeably and are intended to include, but are not limited to, nucleic acids having a length of 200 nucleotides or less. In some embodiments, an oligonucleotide is a nucleic acid having a length of 2 to 200 nucleotides, 2 to 150 nucleotides, 5 to 150 nucleotides or 5 to 100 nucleotides. The terms “polynucleotide,” “oligonucleotide,” “oligo” or the like refer, in the usual and customary sense, to a linear sequence of nucleotides. Oligonucleotides are typically from about 5, 6, 7, 8, 9, 10, 12, 15, 25, 30, 40, 50 or more nucleotides in length, up to about 100 nucleotides in length. In some embodiments, an oligonucleotide is a primer configured for extension by a polymerase when the primer is annealed completely or partially to a complementary nucleic acid template. A primer is often a single stranded nucleic acid. In embodiments, a primer, or portion thereof, is substantially complementary to a portion of an adapter. In some embodiments, a primer has a length of 200 nucleotides or less. In embodiments, a primer has a length of 10 to 150 nucleotides, 15 to 150 nucleotides, 5 to 100 nucleotides, 5 to 50 nucleotides or 10 to 50 nucleotides. In some embodiments, an oligonucleotide may be immobilized to a solid support. In some embodiments, a polynucleotide may be a circular polynucleotide. The terms “circular polynucleotide” or “circular oligonucleotide” refer to a contiguous polynucleotide lacking a free 5′ and a free 3′ end.

[0020] As used herein, the terms “polynucleotide primer” and “primer” refers to any polynucleotide molecule that may hybridize to a polynucleotide template, be bound by a polymerase, and be extended in a template-directed process for nucleic acid synthesis (e.g., amplification and/or sequencing). The primer may be a separate polynucleotide from the polynucleotide template, or both may be portions of the same polynucleotide (e.g., as in a hairpin structure having a 3′ end that is extended along another portion of the polynucleotide to extend a double-stranded portion of the hairpin). Primers (e.g., forward or reverse primers) may be attached to a solid support. A primer can be of any length depending on the particular technique it will be used for. For example, PCR primers are generally between 10 and 40 nucleotides in length. The length and complexity of the nucleic acid fixed onto the nucleic acid template may vary. In some embodiments, a primer has a length of 200 nucleotides or less. In embodiments, a primer has a length of 10 to 150 nucleotides, 15 to 150 nucleotides, 5 to 100 nucleotides, 5 to 50 nucleotides or 10 to 50 nucleotides. In embodiments, a primer has a length of 10 to 150 nucleotides, 15 to 150 nucleotides, 5 to 100 nucleotides, 5 to 50 nucleotides or 10 to 50 nucleotides. A primer typically has a length of 10 to 50 nucleotides. For example, a primer may have a length of 10 to 40, 10 to 30, 10 to 20, 25 to 50, 15 to 40, 15 to 30, 20 to 50, 20 to 40, or 20 to 30 nucleotides. In some embodiments, a primer has a length of 18 to 24 nucleotides. One of skill can adjust these factors to provide optimum hybridization and signal production for a given hybridization procedure. The primer permits the addition of a nucleotide residue thereto, or oligonucleotide or polynucleotide synthesis therefrom, under suitable conditions. In an embodiment the primer is a DNA primer, i.e., a primer consisting of, or largely consisting of, deoxyribonucleotide residues. The primers are designed to have a sequence that is the complement of a region of template/target DNA to which the primer hybridizes. The addition of a nucleotide residue to the 3′ end of a primer by formation of a phosphodiester bond results in a DNA extension product. The addition of a nucleotide residue to the 3′ end of the DNA extension product by formation of a phosphodiester bond results in a further DNA extension product. In another embodiment the primer is an RNA primer. In embodiments, a primer is hybridized to a target polynucleotide. A “primer” is complementary to a polynucleotide template, and complexes by hydrogen bonding or hybridization with the template to give a primer/template complex for initiation of synthesis by a polymerase, which is extended by the addition of covalently bonded bases linked at its 3′ end complementary to the template in the process of DNA synthesis. A “splint oligonucleotide” is used in accordance with its plain and ordinary meaning and refers to an oligonucleotide having 2 or more sequences complementary to two or more portions of a polynucleotide. An “oligonucleotide probe” or “oligonucleotide primer”, as used herein, refers to a primer including a sequence (e.g., a target hybridization sequence) at a 3′ end complementary to a sequence (e.g., a probe hybridization sequence) of a target polynucleotide (e.g., a target mRNA molecule). In embodiments, the oligonucleotide probe includes one or more sequences located 5′ (i.e., upstream) of the target hybridization sequence, for example, one or more primer binding sequences. An “extended oligonucleotide probe” or “extended oligonucleotide primer”, as used herein, refers to an oligonucleotide probe that has had one or more nucleotides incorporated into the 3′ end by a polymerase, for example, a reverse transcriptase. In embodiments, an extended oligonucleotide probe includes a region of cDNA (e.g., a cDNA sequence complementary to a portion of an mRNA molecule) located 3′ (i.e., downstream) of the target hybridization sequence. A “target hybridization sequence” as used herein refers to a sequence at a 3′ end of an oligonucleotide probe that is complementary to a sequence in a target polynucleotide (e.g., complementary to a probe hybridization sequence of the target polynucleotide).

[0021] As used herein, the term “primer binding sequence” refers to a polynucleotide sequence that is complementary to at least a portion of a primer (e.g., a sequencing primer or an amplification primer). Primer binding sequences can be of any suitable length. In embodiments, a primer binding sequence is about or at least about 10, 15, 20, 25, 30, or more nucleotides in length. In embodiments, a primer binding sequence is 10-50, 15-30, or 20-25 nucleotides in length. The primer binding sequence may be selected such that the primer (e.g., sequencing primer) has the preferred characteristics to minimize secondary structure formation or minimize non-specific amplification, for example having a length of about 20-30 nucleotides; approximately 50% GC content, and a Tm of about 55° C. to about 65° C.

[0022] Nucleic acids, including e.g., nucleic acids with a phosphorothioate backbone, can include one or more reactive moieties. As used herein, the term reactive moiety includes any group capable of reacting with another molecule, e.g., a nucleic acid or polypeptide through covalent, non-covalent or other interactions. By way of example, the nucleic acid can include an amino acid reactive moiety that reacts with an amino acid on a protein or polypeptide through a covalent, non-covalent or other interaction.

[0023] The order of elements within a nucleic acid molecule is typically described herein from 5′ to 3′. In the case of a double-stranded molecule, the “top” strand is typically shown from 5′ to 3′, according to convention, and the order of elements is described herein with reference to the top strand.

[0024] The term “messenger RNA” or “mRNA” refers to an RNA that is without introns and is capable of being translated into a polypeptide. The term “RNA” refers to any ribonucleic acid, including but not limited to mRNA, tRNA (transfer RNA), rRNA (ribosomal RNA), and/or noncoding RNA (such as lncRNA (long noncoding RNA)). The term “cDNA” refers to a DNA that is complementary or identical to an RNA, in either single stranded or double stranded form.

[0025] A polynucleotide is typically composed of a specific sequence of four nucleotide bases: adenine (A); cytosine (C); guanine (G); and thymine (T) (uracil (U) for thymine (T) when the polynucleotide is RNA). Thus, the term “polynucleotide sequence” is the alphabetical representation of a polynucleotide molecule; alternatively, the term may be applied to the polynucleotide molecule itself. This alphabetical representation can be input into databases in a computer having a central processing unit and used for bioinformatics applications such as functional genomics and homology searching. Polynucleotides may optionally include one or more non-standard nucleotide(s), nucleotide analog(s) and/or modified nucleotides.

[0026] As used herein, the term “associated” or “associated with” can mean that two or more species are identifiable as being co-located at a point in time. An association can mean that two or more species are or were within a similar container. An association can be an informatics association, where for example digital information regarding two or more species is stored and can be used to determine that one or more of the species were co-located at a point in time. An association can also be a physical association. In some instances two or more associated species are “tethered”, “coated”, “attached”, or “immobilized” to one another or to a common solid or semisolid support (e.g. a receiving substrate). An association may refer to a relationship, or connection, between two entities. For example, a barcode sequence may be associated with a particular target by binding a probe including the barcode sequence to the target. In embodiments, detecting the associated barcode provides detection of the target. Associated may refer to the relationship between a sample and the DNA molecules, RNA molecules, or polynucleotides originating from or derived from that sample. These relationships may be encoded in oligonucleotide barcodes, as described herein. A polynucleotide is associated with a sample if it is an endogenous polynucleotide, i.e., it occurs in the sample at the time the sample is obtained, or is derived from an endogenous polynucleotide. For example, the RNAs endogenous to a cell are associated with that cell. cDNAs resulting from reverse transcription of these RNAs, and DNA amplicons resulting from PCR amplification of the cDNAs, contain the sequences of the RNAs and are also associated with the cell. The polynucleotides associated with a sample need not be located or synthesized in the sample, and are considered associated with the sample even after the sample has been destroyed (for example, after a cell has been lysed). Barcoding can be used to determine which polynucleotides in a mixture are associated with a particular sample. In embodiments, a proximity probe is associated with a particular barcode, such that identifying the barcode identifies the probe with which it is associated. Because the proximity probe specifically binds to a target, identifying the barcode thus identifies the target.

[0027] As used herein, the term “IBD-associated gene” refers to a nucleic acid sequence, including DNA, RNA, cDNA, or an amplification product thereof, that is a priori known to be associated with inflammatory bowel disease in a biological, analytical, or informatic context. Consistent with the definition of “associated” provided herein, the relationship between a gene and IBD is understood before detection, and may be established through its biological origin, its physical interaction with a probe, its representation in curated datasets, and/or its spatial localization within a cell or tissue has been correlated with disease pathology.

[0028] The term “adapter” as used herein refers to any oligonucleotide that can be ligated to a nucleic acid molecule, thereby generating nucleic acid products that can be sequenced on a sequencing platform (e.g., an Illumina or Singular Genomics G4™ sequencing platform). In embodiments, adapters include two reverse complementary oligonucleotides forming a double-stranded structure. In embodiments, an adapter includes two oligonucleotides that are complementary at one portion and mismatched at another portion, forming a Y-shaped or fork-shaped adapter that is double stranded at the complementary portion and has two overhangs at the mismatched portion. Since Y-shaped adapters have a complementary, double-stranded region, they can be considered a special form of double-stranded adapters. When this disclosure contrasts Y-shaped adapters and double stranded adapters, the term “double-stranded adapter” or “blunt-ended” is used to refer to an adapter having two strands that are fully complementary, substantially (e.g., more than 90% or 95%) complementary, or partially complementary. In embodiments, adapters include sequences that bind to sequencing primers. In embodiments, adapters include sequences that bind to immobilized oligonucleotides (e.g., P7 and P5 sequences) or reverse complements thereof. In embodiments, the adapter is substantially non-complementary to the 3′ end or the 5′ end of any target polynucleotide present in the sample. In embodiments, the adapter can include a sequence that is substantially identical, or substantially complementary, to at least a portion of a primer, for example a universal primer. In embodiments, the adapter can include an index sequence (also referred to as barcode or tag) to assist with downstream error correction, identification or sequencing.

[0029] As used herein, the terms “analogue” and “analog”, in reference to a chemical compound, refers to compound having a structure similar to that of another one, but differing from it in respect of one or more different atoms, functional groups, or substructures that are replaced with one or more other atoms, functional groups, or substructures. In the context of a nucleotide, a nucleotide analog refers to a compound that, like the nucleotide of which it is an analog, can be incorporated into a nucleic acid molecule (e.g., an extension product) by a suitable polymerase, for example, a DNA polymerase in the context of a nucleotide analogue. The terms also encompass nucleic acids containing known nucleotide analogs or modified backbone residues or linkages, which are synthetic, naturally occurring, or non-naturally occurring, which have similar binding properties as the reference nucleic acid, and which are metabolized in a manner similar to the reference nucleotides. Examples of such analogs include, without limitation, phosphodiester derivatives including, e.g., phosphoramidate, phosphorodiamidate, phosphorothioate (also known as phosphorothioate having double bonded sulfur replacing oxygen in the phosphate), phosphorodithioate, phosphonocarboxylic acids, phosphonocarboxylates, phosphonoacetic acid, phosphonoformic acid, methyl phosphonate, boron phosphonate, or O-methylphosphoroamidite linkages (see, e.g., see Eckstein, OLIGONUCLEOTIDES AND ANALOGUES: A PRACTICAL APPROACH, Oxford University Press) as well as modifications to the nucleotide bases such as in 5-methyl cytidine or pseudouridine; and peptide nucleic acid backbones and linkages. Other analog nucleic acids include those with positive backbones; non-ionic backbones, modified sugars, and non-ribose backbones (e.g. phosphorodiamidate morpholino oligos or locked nucleic acids (LNA)), including those described in U.S. Pat. Nos. 5,235,033 and 5,034,506, and Chapters 6 and 7, ASC Symposium Series 580, CARBOHYDRATE MODIFICATIONS IN ANTISENSE RESEARCH, Sanghui & Cook, eds. Nucleic acids containing one or more carbocyclic sugars are also included within one definition of nucleic acids. Modifications of the ribose-phosphate backbone may be done for a variety of reasons, e.g., to increase the stability and half-life of such molecules in physiological environments or as probes on a biochip. Mixtures of naturally occurring nucleic acids and analogs can be made; alternatively, mixtures of different nucleic acid analogs, and mixtures of naturally occurring nucleic acids and analogs may be made. In embodiments, the internucleotide linkages in DNA are phosphodiester, phosphodiester derivatives, or a combination of both.

[0030] Other analog nucleic acids include bis-locked nucleic acids (bisLNAs; e.g., including those described in Moreno P M D et al. Nucleic Acids Res. 2013; 41(5):3257-73), twisted intercalating nucleic acids (TINAs; e.g., including those described in Doluca O et al. Chembiochem. 2011; 12(15):2365-74), bridged nucleic acids (BNAs; e.g., including those described in Soler-Bistue A et al. Molecules. 2019; 24(12): 2297), 2′-O-methyl RNA:DNA chimeric nucleic acids (e.g., including those described in Wang S and Kool E T. Nucleic Acids Res. 1995; 23(7):1157-1164), minor groove binder (MGB) nucleic acids (e.g., including those described in Kutyavin I V et al. Nucleic Acids Res. 2000; 28(2):655-61), morpholino nucleic acids (e.g., including those described in Summerton J and Weller D. Antisense Nucleic Acid Drug Dev. 1997; 7(3):187-95), C5-modified pyrimidine nucleic acids (e.g., including those described in Kumar P et al. J. Org. Chem. 2014; 79(11): 5047-5061), peptide nucleic acids (PNAs; e.g., including those described in Gupta A et al. J. Biotechnol. 2017; 259: 148-59), and/or phosphorothioate nucleotides (e.g., including those described in Eckstein F. Nucleic Acid Ther. 2014; 24(6):374-87).

[0031] As used herein, a “native” nucleotide is used in accordance with its plain and ordinary meaning and refers to a naturally occurring nucleotide that does not include an exogenous label (e.g., a fluorescent dye, or other label) or chemical modification such as may characterize a nucleotide analog. Examples of native nucleotides useful for carrying out procedures described herein include: dATP (2′-deoxyadenosine-5′-triphosphate); dGTP (2′-deoxyguanosine-5′-triphosphate); dCTP (2′-deoxycytidine-5′-triphosphate); dTTP (2′-deoxythymidine-5′-triphosphate); and dUTP (2′-deoxyuridine-5′-triphosphate).

[0032] In embodiments, the nucleotides of the present disclosure use a cleavable linker to attach the label to the nucleotide. The use of a cleavable linker ensures that the label can, if required, be removed after detection, avoiding any interfering signal with any labelled nucleotide incorporated subsequently. The use of the term “cleavable linker” is not meant to imply that the whole linker is required to be removed from the nucleotide base. The cleavage site can be located at a position on the linker that ensures that part of the linker remains attached to the nucleotide base after cleavage. The linker can be attached at any position on the nucleotide base provided that Watson-Crick base pairing can still be carried out. In the context of purine bases, it is preferred if the linker is attached via the 7-position of the purine or the preferred deazapurine analogue, via an 8-modified purine, via an N-6 modified adenosine or an N-2 modified guanine. For pyrimidines, attachment is preferably via the 5-position on cytidine, thymidine or uracil and the N-4 position on cytosine.

[0033] The term “cleavable linker” or “cleavable moiety” as used herein refers to a divalent or monovalent, respectively, moiety which is capable of being separated (e.g., detached, split, disconnected, hydrolyzed, a stable bond within the moiety is broken) into distinct entities. A cleavable linker is cleavable (e.g., specifically cleavable) in response to external stimuli (e.g., enzymes, nucleophilic/basic reagents, reducing agents, photo-irradiation, electrophilic/acidic reagents, organometallic and metal reagents, or oxidizing reagents). A chemically cleavable linker refers to a linker which is capable of being split in response to the presence of a chemical (e.g., acid, base, oxidizing agent, reducing agent, Pd(0), tris-(2-carboxyethyl)phosphine, dilute nitrous acid, fluoride, tris(3-hydroxypropyl)phosphine), sodium dithionite (Na₂S₂O₄), or hydrazine (N₂H₄)). A chemically cleavable linker is non-enzymatically cleavable. In embodiments, the cleavable linker is cleaved by contacting the cleavable linker with a cleaving agent. In embodiments, the cleaving agent is a phosphine containing reagent (e.g., TCEP or THPP), sodium dithionite (Na₂S₂O₄), weak acid, hydrazine (N₂H₄), Pd(O), or light-irradiation (e.g., ultraviolet radiation). In embodiments, cleaving includes removing. A “cleavable site” or “scissile linkage” in the context of a polynucleotide is a site which allows controlled cleavage of the polynucleotide strand (e.g., the linker, the primer, or the polynucleotide) by chemical, enzymatic, or photochemical means known in the art and described herein. A scissile site may refer to the linkage of a nucleotide between two other nucleotides in a nucleotide strand (i.e., an internucleosidic linkage). In embodiments, the scissile linkage can be located at any position within the one or more nucleic acid molecules, including at or near a terminal end (e.g., the 3′ end of an oligonucleotide) or in an interior portion of the one or more nucleic acid molecules. In embodiments, conditions suitable for separating a scissile linkage include a modulating the pH and/or the temperature. In embodiments, a scissile site can include at least one acid-labile linkage. For example, an acid-labile linkage may include a phosphoramidate linkage. In embodiments, a phosphoramidate linkage can be hydrolysable under acidic conditions, including mild acidic conditions such as trifluoroacetic acid and a suitable temperature (e.g., 30° C.), or other conditions known in the art, for example Matthias Mag, et al Tetrahedron Letters, Volume 33, Issue 48, 1992, 7319-7322. In embodiments, the scissile site can include at least one photolabile internucleosidic linkage (e.g., o-nitrobenzyl linkages, as described in Walker et al, J. Am. Chem. Soc. 1988, 110, 21, 7170-7177), such as o-nitrobenzyloxymethyl or p-nitrobenzyloxymethyl group(s). In embodiments, the scissile site includes at least one uracil nucleobase. In embodiments, a uracil nucleobase can be cleaved with a uracil DNA glycosylase (UDG) or Formamidopyrimidine DNA Glycosylase Fpg. In embodiments, the scissile linkage site includes a sequence-specific nicking site having a nucleotide sequence that is recognized and nicked by a nicking endonuclease enzyme or a uracil DNA glycosylase. Cleavage agents used in methods described herein may be selected from nicking endonucleases, DNA glycosylases, or any single-stranded cleavage agents described in further detail elsewhere herein. Enzymes for cleavage of single-stranded DNA may be used for cleaving heteroduplexes in the vicinity of mismatched bases, D-loops, heteroduplexes formed between two strands of DNA which differ by a single base, an insertion or deletion. Mismatch recognition proteins that cleave one strand of the mismatched DNA in the vicinity of the mismatch site may be used as cleavage agents. Nonenzymatic cleaving may also be done through photodegredation of a linker introduced through a custom oligonucleotide used in a PCR reaction.

[0034] As used herein, the term “modified nucleotide” refers to nucleotide modified in some manner. Typically, a nucleotide contains a single 5-carbon sugar moiety, a single nitrogenous base moiety and 1 to three phosphate moieties. In embodiments, a nucleotide can include a blocking moiety and/or a label moiety. A blocking moiety on a nucleotide prevents formation of a covalent bond between the 3′ hydroxyl moiety of the nucleotide and the 5′ phosphate of another nucleotide. A blocking moiety on a nucleotide can be reversible, whereby the blocking moiety can be removed or modified to allow the 3′ hydroxyl to form a covalent bond with the 5′ phosphate of another nucleotide. A blocking moiety can be effectively irreversible under particular conditions used in a method set forth herein. In embodiments, the blocking moiety is attached to the 3′ oxygen of the nucleotide and is independently —NH₂, —CN, —CH₃, C₂-C₆ allyl (e.g., —CH₂—CH═CH₂), methoxyalkyl (e.g., —CH₂—O—CH₃), or —CH₂N₃. In embodiments, the blocking moiety is attached to the 3′ oxygen of the nucleotide and is independently

[chemical structure]

A label moiety of a modified nucleotide can be any moiety that allows the nucleotide to be detected, for example, using a spectroscopic method. Exemplary label moieties are fluorescent labels, mass labels, chemiluminescent labels, electrochemical labels, detectable labels and the like. One or more of the above moieties can be absent from a nucleotide used in the methods and compositions set forth herein. For example, a nucleotide can lack a label moiety or a blocking moiety or both. Examples of nucleotide analogues include, without limitation, 7-deaza-adenine, 7-deaza-guanine, the analogues of deoxynucleotides shown herein, analogues in which a label is attached through a cleavable linker to the 5-position of cytosine or thymine or to the 7-position of deaza-adenine or deaza-guanine, and analogues in which a small chemical moiety is used to cap the OH group at the 3′-position of deoxyribose. Nucleotide analogues and DNA polymerase-based DNA sequencing are also described in U.S. Pat. No. 6,664,079, which is incorporated herein by reference in its entirety for all purposes. Non-limiting examples of detectable labels include labels including fluorescent dyes, biotin, digoxin, haptens, and epitopes. In general, a dye is a molecule, compound, or substance that can provide an optically detectable signal, such as a colorimetric, luminescent, bioluminescent, chemiluminescent, phosphorescent, or fluorescent signal. In embodiments, the dye is a fluorescent dye. Non-limiting examples of dyes, some of which are commercially available, include CF dyes (Biotium, Inc.), Alexa Fluor dyes (Thermo Fisher), DyLight dyes (Thermo Fisher), Cy dyes (GE Healthscience), IRDyes (Li-Cor Biosciences, Inc.), and HiLyte dyes (Anaspec, Inc.). In embodiments, the label is a fluorophore.

[0035] In some embodiments, a nucleic acid includes a label. As used herein, the term “label” or “labels” is used in accordance with their plain and ordinary meanings and refer to molecules that can directly or indirectly produce or result in a detectable signal either by themselves or upon interaction with another molecule. Non-limiting examples of detectable labels include fluorescent dyes, biotin, digoxin, haptens, and epitopes. In general, a dye is a molecule, compound, or substance that can provide an optically detectable signal, such as a colorimetric, luminescent, bioluminescent, chemiluminescent, phosphorescent, or fluorescent signal. In embodiments, the label is a dye. In embodiments, the dye is a fluorescent dye. Non-limiting examples of dyes, some of which are commercially available, include CF dyes (Biotium, Inc.), Alexa Fluor dyes (Thermo Fisher), DyLight dyes (Thermo Fisher), Cy dyes (GE Healthscience), IRDyes (Li-Cor Biosciences, Inc.), and HiLyte dyes (Anaspec, Inc.). In embodiments, a particular nucleotide type is associated with a particular label, such that identifying the label identifies the nucleotide with which it is associated. In embodiments, the label is luciferin that reacts with luciferase to produce a detectable signal in response to one or more bases being incorporated into an elongated complementary strand, such as in pyrosequencing. In embodiment, a nucleotide includes a label (such as a dye). In embodiments, the label is not associated with any particular nucleotide, but detection of the label identifies whether one or more nucleotides having a known identity were added during an extension step (such as in the case of pyrosequencing). Examples of detectable agents (i.e., labels) include imaging agents, including fluorescent and luminescent substances, molecules, or compositions, including, but not limited to, a variety of organic or inorganic small molecules commonly referred to as “dyes,” “labels,” or “indicators.” Examples include fluorescein, rhodamine, acridine dyes, Alexa dyes, and cyanine dyes. In embodiments, the detectable moiety is a fluorescent molecule (e.g., acridine dye, cyanine, dye, fluorine dye, oxazine dye, phenanthridine dye, or rhodamine dye). In embodiments, the detectable moiety is a fluorescent molecule (e.g., acridine dye, cyanine, dye, fluorine dye, oxazine dye, phenanthridine dye, or rhodamine dye). The term “cyanine” or “cyanine moiety” as described herein refers to a detectable moiety containing two nitrogen groups separated by a polymethine chain. In embodiments, the cyanine moiety has 3 methine structures (i.e., cyanine 3 or Cy3). In embodiments, the cyanine moiety has 5 methine structures (i.e., cyanine 5 or Cy5). In embodiments, the cyanine moiety has 7 methine structures (i.e., cyanine 7 or Cy7).

[0036] The term “nucleoside” refers, in the usual and customary sense, to a glycosylamine including a nucleobase and a five-carbon sugar (ribose or deoxyribose). Non-limiting examples of nucleosides include cytidine, uridine, adenosine, guanosine, thymidine and inosine. Nucleosides may be modified at the base and/or the sugar. The term “nucleotide” refers, in the usual and customary sense, to a single unit of a polynucleotide, i.e., a monomer. Nucleotides can be ribonucleotides, deoxyribonucleotides, or modified versions thereof. Examples of polynucleotides contemplated herein include single and double stranded DNA, single and double stranded RNA, and hybrid molecules having mixtures of single and double stranded DNA and RNA. Examples of nucleic acid, e.g., polynucleotides contemplated herein include any types of RNA, e.g., mRNA, siRNA, miRNA, and guide RNA and any types of DNA, genomic DNA, plasmid DNA, and minicircle DNA, and any fragments thereof. The term “duplex” in the context of polynucleotides refers, in the usual and customary sense, to double strandedness.

[0037] The terms “identical” or percent “identity,” in the context of two or more nucleic acids or polypeptide sequences, refer to two or more sequences or subsequences that are the same or have a specified percentage of amino acid residues or nucleotides that are the same (i.e., about 60% identity, preferably 65%, 70%, 75%, 80%, 85%, 90%, 91%, 92%, 93%, 94%, 95%, 96%, 97%, 98%, 99%, or higher identity over a specified region, when compared and aligned for maximum correspondence over a comparison window or designated region) as measured using a BLAST or BLAST 2.0 sequence comparison algorithms with default parameters described below, or by manual alignment and visual inspection (see, e.g., NCBI web site www.ncbi.nlm.nih.gov/BLAST/or the like). Such sequences are then said to be “substantially identical.” This definition also refers to, or may be applied to, the complement of a test sequence. The definition also includes sequences that have deletions and/or additions, as well as those that have substitutions. As described below, the preferred algorithms can account for gaps and the like. Preferably, identity exists over a region that is at least about 25 amino acids or nucleotides in length, or more preferably over a region that is 50-100 amino acids or nucleotides in length.

[0038] As used herein, the term “removable” group, e.g., a label or a blocking group or protecting group, is used in accordance with its plain and ordinary meaning and refers to a chemical group that can be removed from a nucleotide analogue such that a DNA polymerase can extend the nucleic acid (e.g., a primer or extension product) by the incorporation of at least one additional nucleotide. Removal may be by any suitable method, including enzymatic, chemical, or photolytic cleavage. Removal of a removable group, e.g., a blocking group, does not require that the entire removable group be removed, only that a sufficient portion of it be removed such that a DNA polymerase can extend a nucleic acid by incorporation of at least one additional nucleotide using a nucleotide or nucleotide analogue. In general, the conditions under which a removable group is removed are compatible with a process employing the removable group (e.g., an amplification process or sequencing process).

[0039] As used herein, the terms “reversible blocking groups” and “reversible terminators” are used in accordance with their plain and ordinary meanings and refer to a blocking moiety located, for example, at the 3′ position of a modified nucleotide and may be a chemically cleavable moiety such as an allyl group, an azidomethyl group or a methoxymethyl group, or may be an enzymatically cleavable group such as a phosphate ester. Non-limiting examples of nucleotide blocking moieties are described in applications WO 2004/018497, WO 96/07669, U.S. Pat. Nos. 7,057,026, 7,541,444, 5,763,594, 5,808,045, 5,872,244 and 6,232,465 the contents of which are incorporated herein by reference in their entirety. The nucleotides may be labelled or unlabeled. They may be modified with reversible terminators useful in methods provided herein and may be 3′-O-blocked reversible or 3′-unblocked reversible terminators. In nucleotides with 3′-O-blocked reversible terminators, the blocking group —OR [reversible terminating (capping) group] is linked to the oxygen atom of the 3′-OH of the pentose, while the label is linked to the base, which acts as a reporter and can be cleaved. The 3′-O-blocked reversible terminators are known in the art, and may be, for instance, a 3′-ONH₂ reversible terminator, a 3′-O-allyl reversible terminator, or a 3′-O-azidomethyl reversible terminator. In embodiments, the reversible terminator moiety is attached to the 3′-oxygen of the nucleotide, having the formula:

[chemical structure]

wherein the 3′ oxygen of the nucleotide is not shown in the formulae above. The term “allyl” as described herein refers to an unsubstituted methylene attached to a vinyl group (i.e., —CH═CH₂). In embodiments, the reversible terminator moiety is

[chemical structure]

as described in U.S. Pat. No. 10,738,072, which is incorporated herein by reference for all purposes. For example, a nucleotide including a reversible terminator moiety may be represented by the formula:

[chemical structure]

where the nucleobase is adenine or adenine analogue, thymine or thymine analogue, guanine or guanine analogue, or cytosine or cytosine analogue.

[0040] In some embodiments, a nucleic acid (e.g., a probe or a primer) includes a molecular identifier or a molecular barcode. As used herein, the term “molecular barcode” (which may be referred to as a “tag”, a “barcode”, a “molecular identifier”, an “identifier sequence” or a “unique molecular identifier” (UMI)) refers to any material (e.g., a nucleotide sequence, a nucleic acid molecule feature) that is capable of distinguishing an individual molecule in a large heterogeneous population of molecules. In embodiments, a barcode is unique in a pool of barcodes that differ from one another in sequence, or is uniquely associated with a particular sample polynucleotide in a pool of sample polynucleotides. In embodiments, every barcode in a pool of adapters is unique, such that sequencing reads including the barcode can be identified as originating from a single sample polynucleotide molecule on the basis of the barcode alone. In other embodiments, individual barcode sequences may be used more than once, but adapters including the duplicate barcodes are associated with different sequences and/or in different combinations of barcoded adaptors, such that sequence reads may still be uniquely distinguished as originating from a single sample polynucleotide molecule on the basis of a barcode and adjacent sequence information (e.g., sample polynucleotide sequence, and/or one or more adjacent barcodes). In embodiments, barcodes are about or at least about 5, 6, 7, 8, 9, 10, 15, 20, 25, 30, 40, 50, 75 or more nucleotides in length. In embodiments, barcodes are shorter than 20, 15, 10, 9, 8, 7, 6, or 5 nucleotides in length. In embodiments, barcodes are about 10 to about 50 nucleotides in length, such as about 15 to about 40 or about 20 to about 30 nucleotides in length. In a pool of different barcodes, barcodes may have the same or different lengths. In general, barcodes are of sufficient length and include sequences that are sufficiently different to allow the identification of sequencing reads that originate from the same sample polynucleotide molecule. In embodiments, each barcode in a plurality of barcodes differs from every other barcode in the plurality by at least three nucleotide positions, such as at least 3, 4, 5, 6, 7, 8, 9, 10, or more nucleotide positions. In some embodiments, substantially degenerate barcodes may be known as random. In some embodiments, a barcode may include a nucleic acid sequence from within a pool of known sequences. In some embodiments, the barcodes may be pre-defined. In embodiments, the barcodes are selected to form a known set of barcodes, e.g., the set of barcodes may be distinguished by a particular Hamming distance. In embodiments, each barcode sequence is unique within the known set of barcodes. In embodiments, each barcode sequence is associated with a particular oligonucleotide probe.

[0041] In embodiments, a nucleic acid (e.g., an adapter or primer) includes a sample barcode. In general, a “sample barcode” is a nucleotide sequence that is sufficiently different from other sample barcode to allow the identification of the sample source based on sample barcode sequence(s) with which they are associated. In embodiments, a plurality of nucleotides (e.g., all nucleotides from a particular sample source, or sub-sample thereof) are joined to a first sample barcode, while a different plurality of nucleotides (e.g., all nucleotides from a different sample source, or different subsample) are joined to a second sample barcode, thereby associating each plurality of polynucleotides with a different sample barcode indicative of sample source. In embodiments, each sample barcode in a plurality of sample barcodes differs from every other sample barcode in the plurality by at least three nucleotide positions, such as at least 3, 4, 5, 6, 7, 8, 9, 10, or more nucleotide positions. In some embodiments, substantially degenerate sample barcodes may be known as random. In some embodiments, a sample barcode may include a nucleic acid sequence from within a pool of known sequences, In some embodiments, the sample barcodes may be pre-defined. In embodiments, the sample barcode includes about 1 to about 10 nucleotides. In embodiments, the sample barcode includes about 3, 4, 5, 6, 7, 8, 9, or about 10 nucleotides. In embodiments, the sample barcode includes about 3 nucleotides. In embodiments, the sample barcode includes about 5 nucleotides. In embodiments, the sample barcode includes about 7 nucleotides. In embodiments, the sample barcode includes about 10 nucleotides. In embodiments, the sample barcode includes about 6 to about 10 nucleotides.

[0042] As used herein, the term “DNA polymerase” and “nucleic acid polymerase” are used in accordance with their plain ordinary meanings and refer to enzymes capable of synthesizing nucleic acid molecules from nucleotides (e.g., deoxyribonucleotides). Exemplary types of polymerases that may be used in the compositions and methods of the present disclosure include the nucleic acid polymerases such as DNA polymerase, DNA- or RNA-dependent RNA polymerase, and reverse transcriptase. In some cases, the DNA polymerase is 9° N polymerase or a variant thereof, E. coli DNA polymerase I, Bacteriophage T4 DNA polymerase, Sequenase, Taq DNA polymerase, DNA polymerase from Bacillus stearothermophilus, Bst 2.0 DNA polymerase, 9° N polymerase (exo-)A485L/Y409V, Phi29 DNA Polymerase (φ29 DNA Polymerase), T7 DNA polymerase, DNA polymerase II, DNA polymerase III holoenzyme, DNA polymerase IV, DNA polymerase V, VentR DNA polymerase, Therminator™ II DNA Polymerase, Therminator™ III DNA Polymerase, or Therminator™ IX DNA Polymerase. In embodiments, the polymerase is a protein polymerase. Typically, a DNA polymerase adds nucleotides to the 3′-end of a DNA strand, one nucleotide at a time. In embodiments, the DNA polymerase is a Pol I DNA polymerase, Pol II DNA polymerase, Pol III DNA polymerase, Pol IV DNA polymerase, Pol V DNA polymerase, Pol β DNA polymerase, Pol μ DNA polymerase, Pol λ DNA polymerase, Pol σ DNA polymerase, Pol α DNA polymerase, Pol δ DNA polymerase, Pol ε DNA polymerase, Pol η DNA polymerase, Pol ξ DNA polymerase, Pol κ DNA polymerase, Pol ζ DNA polymerase, Pol γ DNA polymerase, Pol θ DNA polymerase, Pol ν DNA polymerase, or a thermophilic nucleic acid polymerase (e.g. Therminator 7, 9° N polymerase (exo-), Therminator II, Therminator III, or Therminator IX). In embodiments, the DNA polymerase is a modified archaeal DNA polymerase. In embodiments, the polymerase is a reverse transcriptase. In embodiments, the polymerase is a mutant P. abyssi polymerase (e.g., such as a mutant P. abyssi polymerase described in WO 2018/148723 or WO 2020/056044). In embodiments, the polymerase is an enzyme described in US 2021/0139884. For example, a polymerase catalyzes the addition of a next correct nucleotide to the 3′-OH group of the primer via a phosphodiester bond, thereby chemically incorporating the nucleotide into the primer. Optionally, the polymerase used in the provided methods is a processive polymerase. Optionally, the polymerase used in the provided methods is a distributive polymerase.

[0043] As used herein, the term “thermophilic nucleic acid polymerase” refers to a family of DNA polymerases (e.g., 9° N™) and mutants thereof derived from the DNA polymerase originally isolated from the hyperthermophilic archaea, Thermococcus sp. 9 degrees N-7, found in hydrothermal vents at that latitude (East Pacific Rise) (Southworth M W, et al. PNAS. 1996; 93(11):5281-5285). A thermophilic nucleic acid polymerase is a member of the family B DNA polymerases. Site-directed mutagenesis of the 3′-5′ exo motif I (Asp-Ile-Glu or DIE) to AIA, AIE, EIE, EID or DIA yielded polymerase with no detectable 3′ exonuclease activity. Mutation to Asp-Ile-Asp (DID) resulted in reduction of 3′-5′ exonuclease specific activity to <1% of wild type, while maintaining other properties of the polymerase including its high strand displacement activity. The sequence AIA (D141A, E143A) was chosen for reducing exonuclease. Subsequent mutagenesis of key amino acids results in an increased ability of the enzyme to incorporate dideoxynucleotides, ribonucleotides and acyclonucleotides (e.g., Therminator II enzyme from New England Biolabs with D141A/E143A/Y409V/A485L mutations); 3′-amino-dNTPs, 3′-azido-dNTPs and other 3′-modified nucleotides (e.g., NEB Therminator III DNA Polymerase with D141A/E143A/L408S/Y409A/P410V mutations, NEB Therminator IX DNA polymerase), or 7-phosphate labeled nucleotides (e.g., Therminator 7: D141A/E143A/W355A/L408 W/R460A/Q461S/K464E/D480V/R484 W/A485L). Typically, these enzymes do not have 5′-3′ exonuclease activity. Additional information about thermophilic nucleic acid polymerases may be found in (Southworth M W, et al. PNAS. 1996; 93(11):5281-5285; Bergen K, et al. ChemBioChem. 2013; 14(9):1058-1062; Kumar S, et al. Scientific Reports. 2012; 2:684; Fuller C W, et al. 2016; 113(19):5233-5238; Guo J, et al. Proceedings of the National Academy of Sciences of the United States of America. 2008; 105(27):9145-9150), which are incorporated herein in their entirety for all purposes.

[0044] As used herein, the term “strand-displacing polymerase” refers to a type of polymerase (e.g., a DNA polymerase or reverse transcriptase) that is able to synthesize new DNA strands while simultaneously displacing the template strand in a single reaction. Strand-displacing polymerases are able to displace one or more nucleotides, for example 10 or 100 or more nucleotides, that are downstream from the enzyme. Strand-displacing polymerases are commonly used in isothermal amplification techniques, such as loop-mediated isothermal amplification (LAMP) and multiple displacement amplification (MDA). One example of a strand-displacing polymerase is the Bst DNA polymerase, which is commonly used in LAMP reactions. Another example is the phi29 DNA polymerase, which is often used in RCA reactions.

[0045] As used herein, the term “exonuclease activity” is used in accordance with its ordinary meaning in the art, and refers to the removal of a nucleotide from a nucleic acid by an enzyme (e.g. DNA polymerase, a lambda exonuclease, Exo I, Exo III, T5, Exo V, Exo VII or the like). For example, during polymerization, nucleotides are added to the 3′ end of the primer strand. Occasionally a DNA polymerase incorporates an incorrect nucleotide to the 3′-OH terminus of the primer strand, wherein the incorrect nucleotide cannot form a hydrogen bond to the corresponding base in the template strand. Such a nucleotide, added in error, is removed from the primer as a result of the 3′ to 5′ exonuclease activity of the DNA polymerase. In embodiments, exonuclease activity may be referred to as “proofreading.” When referring to 3′-5′ exonuclease activity, it is understood that the DNA polymerase facilitates a hydrolyzing reaction that breaks phosphodiester bonds at the 3′ end of a polynucleotide chain to excise the nucleotide. In embodiments, 3′-5′ exonuclease activity refers to the successive removal of nucleotides in single-stranded DNA in a 3′→5′ direction, releasing deoxyribonucleoside 5′-monophosphates one after another. Methods for quantifying exonuclease activity are known in the art, see for example Southworth et al, PNAS Vol 93, 8281-8285 (1996). In embodiments, 5′-3′ exonuclease activity refers to the successive removal of nucleotides in double-stranded DNA in a 5′→3′ direction. In embodiments, the 5′-3′ exonuclease is lambda exonuclease. For example, lambda exonuclease catalyzes the removal of 5′ mononucleotides from duplex DNA, with a preference for 5′ phosphorylated double-stranded DNA. In other embodiments, the 5′-3′ exonuclease is E. coli DNA Polymerase I.

[0046] As used herein, the term “incorporating” or “chemically incorporating,” when used in reference to a primer and cognate nucleotide, refers to the process of joining the cognate nucleotide to the primer or extension product thereof by formation of a phosphodiester bond.

[0047] As used herein, the term “selective” or “selectivity” or the like of a compound refers to the compound's ability to discriminate between molecular targets. For example, a chemical reagent may selectively modify one nucleotide type in that it reacts with one nucleotide type (e.g., cytosines) and not other nucleotide types (e.g., adenine, thymine, or guanine). When used in the context of sequencing, such as in “selectively sequencing,” this term refers to sequencing one or more target polynucleotides from an original starting population of polynucleotides, and not sequencing non-target polynucleotides from the starting population. Typically, selectively sequencing one or more target polynucleotides involves differentially manipulating the target polynucleotides based on known sequence. For example, target polynucleotides may be hybridized to a probe oligonucleotide that may be labeled (such as with a member of a binding pair) or bound to a surface. In embodiments, hybridizing a target polynucleotide to a probe oligonucleotide includes the step of displacing one strand of a double-stranded nucleic acid. Probe-hybridized target polynucleotides may then be separated from non-hybridized polynucleotides, such as by removing probe-bound polynucleotides from the starting population or by washing away polynucleotides that are not bound to a probe. The result is a selected subset of the starting population of polynucleotides, which is then subjected to sequencing, thereby selectively sequencing the one or more target polynucleotides.

[0048] As used herein, the term “template polynucleotide” refers to any polynucleotide molecule that may be bound by a polymerase and utilized as a template for nucleic acid synthesis. A template polynucleotide may be a target polynucleotide. In general, the term “target polynucleotide” refers to a nucleic acid molecule or polynucleotide in a starting population of nucleic acid molecules having a target sequence whose presence, amount, and/or nucleotide sequence, or changes in one or more of these, are desired to be determined. The target sequence may be a portion of a gene, a regulatory sequence, genomic DNA, cDNA, RNA including mRNA, miRNA, rRNA, or others. The target sequence may be a target sequence from a sample or a secondary target such as a product of an amplification reaction. A target polynucleotide is not necessarily any single molecule or sequence. For example, a target polynucleotide may be any one of a plurality of target polynucleotides in a reaction, or all polynucleotides in a given reaction, depending on the reaction conditions. For example, in a nucleic acid amplification reaction with random primers, all polynucleotides in a reaction may be amplified. As a further example, a collection of targets may be simultaneously assayed using polynucleotide primers directed to a plurality of targets in a single reaction. As yet another example, all or a subset of polynucleotides in a sample may be modified by the addition of a primer-binding sequence (such as by the ligation of adapters containing the primer binding sequence), rendering each modified polynucleotide a target polynucleotide in a reaction with the corresponding primer polynucleotide(s). In embodiments, the template polynucleotide includes a target nucleic acid sequence and one or more barcode sequences. In embodiments, the template polynucleotide is a barcode sequence. A “target sequence”, as used herein, refers to a sequence of a splint oligonucleotide that is the same, or substantially the same, as a sequence in a target polynucleotide (i.e., the target sequence of the splint oligonucleotide is the same, or substantially the same, as the target sequence in the target polynucleotide). In embodiments, the target sequence is a known sequence. In embodiments, the target sequence is selected from a set of known target sequences. In embodiments, the target sequence is located 5′ of the probe hybridization sequence of the target polynucleotide. A “subject sequence”, as used herein, refers to the sequence of interest in a target polynucleotide. For example, an oligonucleotide probe may be hybridized upstream of a subject sequence of a target polynucleotide and extending the oligonucleotide probe incorporates a sequence complementary to the subject sequence (i.e., a subject sequence complement) into the oligonucleotide probe. The extended oligonucleotide probe may then be processed further (e.g., circularized and/or amplified), and the subject sequence detected by, e.g., sequencing.

[0049] In embodiments, a target polynucleotide is a cell-free polynucleotide. In general, the terms “cell-free,” “circulating,” and “extracellular” as applied to polynucleotides (e.g. “cell-free DNA” (cfDNA) and “cell-free RNA” (cfRNA)) are used interchangeably to refer to polynucleotides present in a sample from a subject or portion thereof that can be isolated or otherwise manipulated without applying a lysis step to the sample as originally collected (e.g., as in extraction from cells or viruses). Cell-free polynucleotides are thus unencapsulated or “free” from the cells or viruses from which they originate, even before a sample of the subject is collected. Cell-free polynucleotides may be produced as a byproduct of cell death (e.g., apoptosis or necrosis) or cell shedding, releasing polynucleotides into surrounding body fluids or into circulation. Accordingly, cell-free polynucleotides may be isolated from a non-cellular fraction of blood (e.g., serum or plasma), from other bodily fluids (e.g., urine), or from non-cellular fractions of other types of samples.

[0050] As used herein, the terms “specific”, “specifically”, “specificity”, or the like of a compound refers to the compound's ability to cause a particular action, such as binding, to a particular molecular target with minimal or no action to other proteins in the cell.

[0051] The terms “attached,” “bind,” and “bound” as used herein are used in accordance with their plain and ordinary meanings and refer to an association between atoms or molecules. The association can be direct or indirect. For example, attached molecules may be directly bound to one another, e.g., by a covalent bond or non-covalent bond (e.g. electrostatic interactions (e.g. ionic bond, hydrogen bond, halogen bond), van der Waals interactions (e.g. dipole-dipole, dipole-induced dipole, London dispersion), ring stacking (pi effects), hydrophobic interactions and the like). As a further example, two molecules may be bound indirectly to one another by way of direct binding to one or more intermediate molecules, thereby forming a complex.

[0052] “Specific binding” is where the binding is selective between two molecules. A particular example of specific binding is that which occurs between an antibody and an antigen. Typically, specific binding can be distinguished from non-specific when the dissociation constant (KD) is less than about 1×10⁻⁵ M or less than about 1×10⁻⁶ M or 1×10⁻⁷ M. Specific binding can be detected, for example, by ELISA, immunoprecipitation, coprecipitation, with or without chemical crosslinking, two-hybrid assays and the like. In embodiments, the KD (equilibrium dissociation constant) between two specific binding molecules is less than 10-6 M, less than 10-7 M, less than 10-8 M, less than 10-9 M, less than 10-9 M, less than 10-11 M, or less than about 10-12 M or less.

[0053] As used herein, the terms “sequencing”, “sequence determination”, “determining a nucleotide sequence”, and the like include determination of a partial or complete sequence information (e.g., a sequence) of a polynucleotide being sequenced, and particularly physical processes for generating such sequence information. That is, the term includes sequence comparisons, consensus sequence determination, contig assembly, fingerprinting, and like levels of information about a target polynucleotide, as well as the express identification and ordering of nucleotides in a target polynucleotide. The term also includes the determination of the identification, ordering, and locations of one, two, or three of the four types of nucleotides within a target polynucleotide. In some embodiments, a sequencing process described herein includes contacting a template and an annealed primer with a suitable polymerase under conditions suitable for polymerase extension and/or sequencing.

[0054] As used herein, the term “polymer” refers to macromolecules having one or more structurally unique repeating units. The repeating units are referred to as “monomers,” which are polymerized for the polymer. Typically, a polymer is formed by monomers linked in a chain-like structure. A polymer formed entirely from a single type of monomer is referred to as a “homopolymer.” A polymer formed from two or more unique repeating structural units may be referred to as a “copolymer.” A polymer may be linear or branched, and may be random, block, polymer brush, hyperbranched polymer, bottlebrush polymer, dendritic polymer, or polymer micelles. The term “polymer” includes homopolymers, copolymers, tripolymers, tetra polymers and other polymeric molecules made from monomeric subunits. Copolymers include alternating copolymers, periodic copolymers, statistical copolymers, random copolymers, block copolymers, linear copolymers and branched copolymers. The term “polymerizable monomer” is used in accordance with its meaning in the art of polymer chemistry and refers to a compound that may covalently bind chemically to other monomer molecules (such as other polymerizable monomers that are the same or different) to form a polymer.

[0055] Polymers can be hydrophilic, hydrophobic or amphiphilic, as known in the art. Thus, “hydrophilic polymers” are substantially miscible with water and include, but are not limited to, polyethylene glycol and the like. “Hydrophobic polymers” are substantially immiscible with water and include, but are not limited to, polyethylene, polypropylene, polybutadiene, polystyrene, polymers disclosed herein, and the like. “Amphiphilic polymers” have both hydrophilic and hydrophobic properties and are typically copolymers having hydrophilic segment(s) and hydrophobic segment(s). Polymers include homopolymers, random copolymers, and block copolymers, as known in the art. The term “homopolymer” refers, in the usual and customary sense, to a polymer having a single monomeric unit. The term “copolymer” refers to a polymer derived from two or more monomeric species. The term “random copolymer” refers to a polymer derived from two or more monomeric species with no preferred ordering of the monomeric species. The term “block copolymer” refers to polymers having two or homopolymer subunits linked by covalent bond. Thus, the term “hydrophobic homopolymer” refers to a homopolymer which is hydrophobic. The term “hydrophobic block copolymer” refers to two or more homopolymer subunits linked by covalent bonds and which is hydrophobic.

[0056] As used herein, the term “hydrogel” refers to a three-dimensional polymeric structure that is substantially insoluble in water, but which is capable of absorbing and retaining large quantities of water to form a substantially stable, often soft and pliable, structure. In embodiments, water can penetrate in between polymer chains of a polymer network, subsequently causing swelling and the formation of a hydrogel. In embodiments, hydrogels are super-absorbent (e.g., containing more than about 90% water) and can be comprised of natural or synthetic polymers.

[0057] As used herein, the term “substrate” refers to a solid support material. The substrate can be non-porous or porous. The substrate can be rigid or flexible. As used herein, the terms “solid support” and “solid surface” refers to discrete solid or semi-solid surface. A solid support may encompass any type of solid, porous, or hollow sphere, ball, cylinder, or other similar configuration composed of plastic, ceramic, metal, or polymeric material (e.g., hydrogel) onto which a nucleic acid may be immobilized (e.g., covalently or non-covalently). A nonporous substrate generally provides a seal against bulk flow of liquids or gases. Exemplary solid supports include, but are not limited to, glass and modified or functionalized glass, plastics (including acrylics, polystyrene and copolymers of styrene and other materials, polypropylene, polyethylene, polybutylene, polyurethanes, Teflon™, cyclic olefin copolymers, polyimides etc.), nylon, ceramics, resins, Zeonor, silica or silica-based materials including silicon and modified silicon, carbon, metals, inorganic glasses, optical fiber bundles, photopatternable dry film resists, UV-cured adhesives and polymers. Particularly useful solid supports for some embodiments have at least one surface located within a flow cell. Solid surfaces can also be varied in their shape depending on the application in a method described herein. For example, a solid surface useful herein can be planar, or contain regions which are concave or convex. In embodiments, the geometry of the concave or convex regions (e.g., wells) of the solid surface conform to the size and shape of the particle to maximize the contact between as substantially circular particle. In embodiments, the wells of an array are randomly located such that nearest neighbor features have random spacing between each other. Alternatively, in embodiments the spacing between the wells can be ordered, for example, forming a regular pattern. The term solid substrate is encompassing of a substrate (e.g., a flow cell) having a surface including a polymer coating covalently attached thereto. In embodiments, the solid substrate is a flow cell. The term “flow cell” as used herein refers to a chamber including a solid surface across which one or more fluid reagents can be flowed. Examples of flow cells and related fluidic systems and detection platforms that can be readily used in the methods of the present disclosure are described, for example, in Bentley et al., Nature 456:53-59 (2008). In embodiments a substrate includes a surface (e.g., a surface of a flow cell, a surface of a tube, a surface of a chip), for example a metal surface (e.g., steel, gold, silver, aluminum, silicon and copper). In embodiments a substrate (e.g., a substrate surface) is coated and/or includes functional groups and/or inert materials. In embodiments a substrate includes a bead, a chip, a capillary, a plate, a membrane, a wafer (e.g., silicon wafers), a comb, or a pin for example. In some embodiments a substrate includes a bead and/or a nanoparticle. A substrate can be made of a suitable material, non-limiting examples of which include a plastic or a suitable polymer (e.g., polycarbonate, poly(vinyl alcohol), poly(divinylbenzene), polystyrene, polyamide, polyester, polyvinylidene difluoride (PVDF), polyethylene, polyurethane, polypropylene, and the like), borosilicate, glass, nylon, Wang resin, Merrifield resin, metal (e.g., iron, a metal alloy, sepharose, agarose, polyacrylamide, dextran, cellulose and the like or combinations thereof. In embodiments a substrate includes a magnetic material (e.g., iron, nickel, cobalt, platinum, aluminum, and the like). In embodiments a substrate includes a magnetic bead (e.g., DYNABEADS®, hematite, AMPure XP). Magnets can be used to purify and/or capture nucleic acids bound to substrates (e.g., substrates including a metal or magnetic material). The flow cell is typically a glass slide containing small fluidic channels (e.g., a glass slide 75 mm×25 mm×1 mm having one or more channels), through which sequencing solutions (e.g., polymerases, nucleotides, and buffers) may traverse. Though typically glass, suitable flow cell materials may include polymeric materials, plastics, silicon, quartz (fused silica), Borofloat® glass, silica, silica-based materials, carbon, metals, an optical fiber or optical fiber bundles, sapphire, or plastic materials such as COCs and epoxies. The particular material can be selected based on properties desired for a particular use. For example, materials that are transparent to a desired wavelength of radiation are useful for analytical techniques that will utilize radiation of the desired wavelength. Conversely, it may be desirable to select a material that does not pass radiation of a certain wavelength (e.g., being opaque, absorptive, or reflective). In embodiments, the material of the flow cell is selected due to the ability to conduct thermal energy. In embodiments, a flow cell includes inlet and outlet ports and a flow channel extending there between.

[0058] The term “surface” is intended to mean an external part or external layer of a substrate. The surface can be in contact with another material such as a gas, liquid, gel, polymer, organic polymer, second surface of a similar or different material, metal, or coat. The surface, or regions thereof, can be substantially flat. The substrate and/or the surface can have surface features such as wells, pits, channels, ridges, raised regions, pegs, posts or the like.

[0059] The term “microplate”, or “multiwell container” as used herein, refers to a substrate including a surface, the surface including a plurality of reaction chambers separated from each other by interstitial regions on the surface. In embodiments, the microplate has dimensions as provided and described by American National Standards Institute (ANSI) and Society for Laboratory Automation And Screening (SLAS); for example the tolerances and dimensions set forth in ANSI SLAS 1-2004 (R2012); ANSI SLAS 2-2004 (R2012); ANSI SLAS 3-2004 (R2012); ANSI SLAS 4-2004 (R2012); and ANSI SLAS 6-2012, which are incorporated herein by reference. The dimensions of the microplate as described herein and the arrangement of the reaction chambers may be compatible with an established format for automated laboratory equipment. In embodiments, the device described herein provides methods for high-throughput screening. High-throughput screening (HTS) refers to a process that uses a combination of modern robotics, data processing and control software, liquid handling devices, and/or sensitive detectors, to efficiently process a large amount of (e.g., thousands, hundreds of thousands, or millions) samples in biochemical, genetic, or pharmacological experiments, either in parallel or in sequence, within a reasonably short period of time (e.g., days). Preferably, the process is amenable to automation, such as robotic simultaneous handling of 96 samples, 384 samples, 1536 samples or more. A typical HTS robot tests up to 100,000 to a few hundred thousand compounds per day. The samples are often in small volumes, such as no more than 1 mL, 500 μl, 200 μl, 100 μl, 50 μl or less. Through this process, one can rapidly identify active compounds, small molecules, antibodies, proteins or polynucleotides in a cell.

[0060] The reaction chambers may be provided as wells of a multiwell container (alternatively referred to as reaction chambers), for example a microplate may contain 2, 4, 6, 12, 24, 48, 96, 384, or 1536 sample wells. In embodiments, the 96 and 384 wells are arranged in a 2:3 rectangular matrix. In embodiments, the 24 wells are arranged in a 3:8 rectangular matrix. In embodiments, the 48 wells are arranged in a 3:4 rectangular matrix. In embodiments, the reaction chamber is a microscope slide (e.g., a glass slide about 75 mm by about 25 mm). In embodiments the slide is a concavity slide (e.g., the slide includes a depression). In embodiments, the slide includes a coating for enhanced cell adhesion (e.g., poly-L-lysine, silanes, carbon nanotubes, polymers, epoxy resins, or gold). In embodiments, the microplate is about 5 inches by about 3.33 inches, and includes a plurality of 5 mm diameter wells. In embodiments, the microplate is about 5 inches by about 3.33 inches, and includes a plurality of 6 mm diameter wells. In embodiments, the microplate is about 5 inches by about 3.33 inches, and includes a plurality of 7 mm diameter wells. In embodiments, the microplate is about 5 inches by about 3.33 inches, and includes a plurality of 7.5 mm diameter wells. In embodiments, the microplate is 5 inches by 3.33 inches, and includes a plurality of 7.5 mm diameter wells. In embodiments, the microplate is about 5 inches by about 3.33 inches, and includes a plurality of 8 mm diameter wells. In embodiments, the microplate is a flat glass or plastic tray in which an array of wells are formed, wherein each well can hold between from a few microliters to hundreds of microliters of fluid reagents and samples. In embodiments, the microplate has a rectangular shape that measures 127.7 mm±0.5 mm in length by 85.4 mm±0.5 mm in width, and includes 6, 12, 24, 48, or 96 wells, wherein each well has an average diameter of about 5-7 mm. In embodiments, the microplate has a rectangular shape that measures 127.7 mm±0.5 mm in length by 85.4 mm±0.5 mm in width, and includes 6, 12, 24, 48, or 96 wells, wherein each well has an average diameter of about 6 mm.

[0061] The term “well” refers to a discrete concave feature in a substrate having a surface opening that is completely surrounded by interstitial region(s) of the surface. Wells can have any of a variety of shapes at their opening in a surface including but not limited to round, elliptical, square, polygonal, or star shaped (i.e., star shaped with any number of vertices). The cross section of a well taken orthogonally with the surface may be curved, square, polygonal, hyperbolic, conical, or angular. The wells of a microplate are available in different shapes, for example F-Bottom: flat bottom; C-Bottom: bottom with minimal rounded edges; V-Bottom: V-shaped bottom; or U-Bottom: U-shaped bottom. In embodiments, the well is substantially square. In embodiments, the well is square. In embodiments, the well is F-bottom. In embodiments, the microplate includes 24 substantially round flat bottom wells. In embodiments, the microplate includes 48 substantially round flat bottom wells. In embodiments, the microplate includes 96 substantially round flat bottom wells. In embodiments, the microplate includes 384 substantially square flat bottom wells.

[0062] The discrete regions (i.e., features, wells) of the microplate may have defined locations in a regular array, which may correspond to a rectilinear pattern, circular pattern, hexagonal pattern, or the like. In embodiments, the pattern of wells includes concentric circles of regions, spiral patterns, rectilinear patterns, hexagonal patterns, and the like. In embodiments, the pattern of wells is arranged in a rectilinear or hexagonal pattern A regular array of such regions is advantageous for detection and data analysis of signals collected from the arrays during an analysis. These discrete regions are separated by interstitial regions. As used herein, the term “interstitial region” refers to an area in a substrate or on a surface that separates other areas of the substrate or surface. For example, an interstitial region can separate one concave feature of an array from another concave feature of the array. The two regions that are separated from each other can be discrete, lacking contact with each other. In another example, an interstitial region can separate a first portion of a feature from a second portion of a feature. In embodiments the interstitial region is continuous whereas the features are discrete, for example, as is the case for an array of wells in an otherwise continuous surface. The separation provided by an interstitial region can be partial or full separation. In embodiments, interstitial regions have a surface material that differs from the surface material of the wells (e.g., the interstitial region contains a photoresist and the surface of the well is glass). In embodiments, interstitial regions have a surface material that is the same as the surface material of the wells (e.g., both the surface of the interstitial region and the surface of well contain a polymer or copolymer).

[0063] As used herein, the term “sequencing reaction mixture” is used in accordance with its plain and ordinary meaning and refers to an aqueous mixture that contains the reagents necessary to allow dNTP or dNTP analogue (e.g., a modified nucleotide) to add a nucleotide to a DNA strand by a DNA polymerase. In embodiments, the sequencing reaction mixture includes a buffer. In embodiments, the buffer includes an acetate buffer, 3-(N-morpholino)propanesulfonic acid (MOPS) buffer, N-(2-Acetamido)-2-aminoethanesulfonic acid (ACES) buffer, phosphate-buffered saline (PBS) buffer, 4-(2-hydroxyethyl)-1-piperazineethanesulfonic acid (HEPES) buffer, N-(1,1-Dimethyl-2-hydroxyethyl)-3-amino-2-hydroxypropanesulfonic acid (AMPSO) buffer, borate buffer (e.g., borate buffered saline, sodium borate buffer, boric acid buffer), 2-Amino-2-methyl-1,3-propanediol (AMPD) buffer, N-cyclohexyl-2-hydroxyl-3-aminopropanesulfonic acid (CAPSO) buffer, 2-Amino-2-methyl-1-propanol (AMP) buffer, 4-(cyclohexylamino)-1-butanesulfonic acid (CABS) buffer, glycine-NaOH buffer, N-Cyclohexyl-2-aminoethanesulfonic acid (CHES) buffer, tris(hydroxymethyl)aminomethane (Tris) buffer, or a N-cyclohexyl-3-aminopropanesulfonic acid (CAPS) buffer. In embodiments, the buffer is a borate buffer. In embodiments, the buffer is a CHES buffer. In embodiments, the sequencing reaction mixture includes nucleotides, wherein the nucleotides include a reversible terminating moiety and a label covalently linked to the nucleotide via a cleavable linker. In embodiments, the sequencing reaction mixture includes a buffer, DNA polymerase, detergent (e.g., Triton X), a chelator (e.g., EDTA), and/or salts (e.g., ammonium sulfate, magnesium chloride, sodium chloride, or potassium chloride).

[0064] As used herein, the term “sequencing cycle” is used in accordance with its plain and ordinary meaning and refers to incorporating one or more nucleotides (e.g., nucleotide analogues) to the 3′ end of a polynucleotide with a polymerase, and detecting one or more labels that identify the one or more nucleotides incorporated. In embodiments, one nucleotide (e.g., a modified nucleotide) is incorporated per sequencing cycle. The sequencing may be accomplished by, for example, sequencing by synthesis, pyrosequencing, and the like. In embodiments, a sequencing cycle includes extending a complementary polynucleotide by incorporating a first nucleotide using a polymerase, wherein the polynucleotide is hybridized to a template nucleic acid, detecting the first nucleotide, and identifying the first nucleotide. In embodiments, to begin a sequencing cycle, one or more differently labeled nucleotides and a DNA polymerase can be introduced. Following nucleotide addition, signals produced (e.g., via excitation and emission of a detectable label) can be detected to determine the identity of the incorporated nucleotide (based on the labels on the nucleotides). Reagents can then be added to remove the 3′ reversible terminator and to remove labels from each incorporated base. Reagents, enzymes, and other substances can be removed between steps by washing. Cycles may include repeating these steps, and the sequence of each cluster is read over the multiple repetitions.

[0065] As used herein, the term “extension” or “elongation” is used in accordance with their plain and ordinary meanings and refer to synthesis by a polymerase of a new polynucleotide strand complementary to a template strand by adding free nucleotides (e.g., dNTPs) from a reaction mixture that are complementary to the template in the 5′-to-3′ direction. Extension includes condensing the 5′-phosphate group of the dNTPs with the 3′-hydroxy group at the end of the nascent (elongating) DNA strand.

[0066] As used herein, the term “sequencing read” is used in accordance with its plain and ordinary meaning and refers to an inferred sequence of nucleotide bases (or nucleotide base probabilities) corresponding to all or part of a single polynucleotide fragment. A sequencing read may include 10, 20, 30, 40, 50, 60, 70, 80, 90, 100, 150, 200, 250, or more nucleotide bases. In embodiments, a sequencing read includes reading a barcode sequence and a template nucleotide sequence. In embodiments, a sequencing read includes reading a template nucleotide sequence. In embodiments, a sequencing read includes reading a barcode and not a template nucleotide sequence. Reads of length 20-40 base pairs (bp) are referred to as ultra-short. Typical sequencers produce read lengths in the range of 100-500 bp. Read length is a factor which can affect the results of biological studies. For example, longer read lengths improve the resolution of de novo genome assembly and detection of structural variants. In embodiments, a sequencing read includes reading a barcode and a template nucleotide sequence. In embodiments, a sequencing read includes reading a template nucleotide sequence. In embodiments, a sequencing read includes reading a barcode and not a template nucleotide sequence. In embodiments, a sequencing read includes a computationally derived string corresponding to the detected label. In some embodiments, a sequencing read may include 300, 400, 500, 600, 700, 800, 900, 1,000, 1,100, 1,200, 1,300, 1,400, 1,500, or more nucleotide bases.

[0067] The term “multiplexing” as used herein refers to an analytical method in which the presence and/or amount of multiple targets, e.g., multiple nucleic acid target sequences, can be assayed simultaneously by using the methods and devices as described herein, each of which has at least one different detection characteristic, e.g., fluorescence characteristic (for example excitation wavelength, emission wavelength, emission intensity, FWHM (full width at half maximum peak height), or fluorescence lifetime) or a unique nucleic acid or protein sequence characteristic. As used herein, the term “multiplex” is used to refer to an assay in which multiple (i.e. at least two) different biomolecules are assayed at the same time, and more particularly in the same aliquot of the sample, or in the same reaction mixture. In embodiments, more than two different biomolecules are assayed at the same time. In embodiments, at least 2, 4, 6, 8, 10, 20, 50, 100, 200, 300, 400, 500, 600, 700, 800, 900, 1000, 1100, 1200, 1300, 1400 or 1500 or more biomolecules are detected according to the present method.

[0068] Complementary single stranded nucleic acids and/or substantially complementary single stranded nucleic acids can hybridize to each other under hybridization conditions, thereby forming a nucleic acid that is partially or fully double stranded. All or a portion of a nucleic acid sequence may be substantially complementary to another nucleic acid sequence, in some embodiments. As referred to herein, “substantially complementary” refers to nucleotide sequences that can hybridize with each other under suitable hybridization conditions. Hybridization conditions can be altered to tolerate varying amounts of sequence mismatch within complementary nucleic acids that are substantially complementary. Substantially complementary portions of nucleic acids that can hybridize to each other can be 75% or more, 76% or more, 77% or more, 78% or more, 79% or more, 80% or more, 81% or more, 82% or more, 83% or more, 84% or more, 85% or more, 86% or more, 87% or more, 88% or more, 89% or more, 90% or more, 91% or more, 92% or more, 93% or more, 94% or more, 95% or more, 96% or more, 97% or more, 98% or more or 99% or more complementary to each other. In some embodiments substantially complementary portions of nucleic acids that can hybridize to each other are 100% complementary. Nucleic acids, or portions thereof, that are configured to hybridize to each other often include nucleic acid sequences that are substantially complementary to each other.

[0069] “Hybridize” shall mean the annealing of a nucleic acid sequence to another nucleic acid sequence (e.g., one single-stranded nucleic acid (such as a primer) to another nucleic acid) based on the well-understood principle of sequence complementarity. In an embodiment the other nucleic acid is a single-stranded nucleic acid. In some embodiments, one portion of a nucleic acid hybridizes to itself, such as in the formation of a hairpin structure. The propensity for hybridization between nucleic acids depends on the temperature and ionic strength of their milieu, the length of the nucleic acids and the degree of complementarity. The effect of these parameters on hybridization is described in, for example, Sambrook J., Fritsch E. F., Maniatis T., Molecular cloning: a laboratory manual, Cold Spring Harbor Laboratory Press, New York (1989). As used herein, hybridization of a primer, or of a DNA extension product, respectively, is extendable by creation of a phosphodiester bond with an available nucleotide or nucleotide analogue capable of forming a phosphodiester bond, therewith. For example, hybridization can be performed at a temperature ranging from 15° C. to 95° C. In some embodiments, the hybridization is performed at a temperature of about 20° C., about 25° C., about 30° C., about 35° C., about 40° C., about 45° C., about 50° C., about 55° C., about 60° C., about 65° C., about 70° C., about 75° C., about 80° C., about 85° C., about 90° C., or about 95° C. In other embodiments, the stringency of the hybridization can be further altered by the addition or removal of components of the buffered solution.

[0070] As used herein, “specifically hybridizes” refers to preferential hybridization under hybridization conditions where two nucleic acids, or portions thereof, that are substantially complementary, hybridize to each other and not to other nucleic acids that are not substantially complementary to either of the two nucleic acids. For example, specific hybridization includes the hybridization of a primer or capture nucleic acid to a portion of a target nucleic acid (e.g., a template, or adapter portion of a template) that is substantially complementary to the primer or capture nucleic acid. In some embodiments nucleic acids, or portions thereof, that are configured to specifically hybridize are often about 80% or more, 81% or more, 82% or more, 83% or more, 84% or more, 85% or more, 86% or more, 87% or more, 88% or more, 89% or more, 90% or more, 91% or more, 92% or more, 93% or more, 94% or more, 95% or more, 96% or more, 97% or more, 98% or more, 99% or more or 100% complementary to each other over a contiguous portion of nucleic acid sequence. A specific hybridization discriminates over non-specific hybridization interactions (e.g., two nucleic acids that a not configured to specifically hybridize, e.g., two nucleic acids that are 80% or less, 70% or less, 60% or less or 50% or less complementary) by about 2-fold or more, often about 10-fold or more, and sometimes about 100-fold or more, 1000-fold or more, 10,000-fold or more, 100,000-fold or more, or 1,000,000-fold or more. Two nucleic acid strands that are hybridized to each other can form a duplex which includes a double stranded portion of nucleic acid.

[0071] As used herein, the term “adjacent,” refers to two nucleotide sequences in a nucleic acid, can refer to nucleotide sequences separated by 0 to about 20 nucleotides, more specifically, in a range of about 1 to about 10 nucleotides, or to sequences that directly abut one another. As those of skill in the art appreciate, two nucleotide sequences that that are to ligated together will generally directly abut one another.

[0072] A nucleic acid can be amplified by a suitable method. The term “amplification,” “amplified” or “amplifying” as used herein refers to subjecting a target nucleic acid in a sample to a process that linearly or exponentially generates amplicon nucleic acids having the same or substantially the same (e.g., substantially identical) nucleotide sequence as the target nucleic acid, or segment thereof, and/or a complement thereof (which may be referred to herein as an “amplification product” or “amplification products”). In some embodiments an amplification reaction includes a suitable thermal stable polymerase. Thermal stable polymerases are known and are stable for prolonged periods of time, at temperature greater than 80° C. when compared to common polymerases found in most mammals. In embodiments the term “amplification,” “amplified” or “amplifying” refers to a method that includes a polymerase chain reaction (PCR). Conditions conducive to amplification (i.e., amplification conditions) are known and often include at least a suitable polymerase, a suitable template, a suitable primer or set of primers, suitable nucleotides (e.g., dNTPs), a suitable buffer, and application of suitable annealing, hybridization and/or extension times and temperatures. In embodiments an amplified product (e.g., an amplicon) can contain one or more additional and/or different nucleotides than the template sequence, or portion thereof, from which the amplicon was generated (e.g., a primer can contain “extra” nucleotides (such as a 5′ portion that does not hybridize to the template), or one or more mismatched bases within a hybridizing portion of the primer).

[0073] Amplification according to the present teachings encompasses any means by which at least a part of at least one target nucleic acid is reproduced, typically in a template-dependent manner, including without limitation, a broad range of techniques for amplifying nucleic acid sequences, either linearly or exponentially. Illustrative means for performing an amplifying step include ligase chain reaction (LCR), ligase detection reaction (LDR), ligation followed by Q-replicase amplification, PCR, primer extension, strand displacement amplification (SDA), hyperbranched strand displacement amplification, multiple displacement amplification (MDA), nucleic acid strand-based amplification (NASBA), two-step multiplexed amplifications, rolling circle amplification (RCA), and the like, including multiplex versions and combinations thereof, for example but not limited to, OLA (oligonucleotide ligation assay)/PCR, PCR/OLA, LDR/PCR, PCR/PCR/LDR, PCR/LDR, LCR/PCR, PCR/LCR (also known as combined chain reaction—CCR), and the like. Descriptions of such techniques can be found in, among other sources, Ausbel et al.; PCR Primer: A Laboratory Manual, Diffenbach, Ed., Cold Spring Harbor Press (1995); The Electronic Protocol Book, Chang Bioscience (2002); Msuih et al., J. Clin. Micro. 34:501-07 (1996); The Nucleic Acid Protocols Handbook, R. Rapley, ed., Humana Press, Totowa, N.J. (2002); Abramson et al., Curr Opin Biotechnol. 1993 February; 4(1):41-7, U.S. Pat. Nos. 6,027,998; 6,605,451, Barany et al., PCT Publication No. WO 97/31256; Wenz et al., PCT Publication No. WO 01/92579; Day et al., Genomics, 29(1): 152-162 (1995), Ehrlich et al., Science 252:1643-50 (1991); Innis et al., PCR Protocols: A Guide to Methods and Applications, Academic Press (1990); Favis et al., Nature Biotechnology 18:561-64 (2000); and Rabenau et al., Infection 28:97-102 (2000); Belgrader, Barany, and Lubin, Development of a Multiplex Ligation Detection Reaction DNA Typing Assay, Sixth International Symposium on Human Identification, 1995 (available on the world wide web at: promega.com/geneticidproc/ussymp6proc/blegrad.html); LCR Kit Instruction Manual, Cat. #200520, Rev. #050002, Stratagene, 2002; Barany, Proc. Natl. Acad. Sci. USA 88:188-93 (1991); Bi and Sambrook, Nucl. Acids Res. 25:2924-2951 (1997); Zirvi et al., Nucl. Acid Res. 27:e40i-viii (1999); Dean et al., Proc Natl Acad Sci USA 99:5261-66 (2002); Barany and Gelfand, Gene 109:1-11 (1991); Walker et al., Nucl. Acid Res. 20:1691-96 (1992); Polstra et al., BMC Inf. Dis. 2:18-(2002); Lage et al., Genome Res. 2003 February; 13(2):294-307, and Landegren et al., Science 241:1077-80 (1988), Demidov, V., Expert Rev Mol Diagn. 2002 November; 2(6):542-8, Cook et al., J Microbiol Methods. 2003 May; 53(2):165-74, Schweitzer et al., Curr Opin Biotechnol. 2001 February; 12(1):21-7, U.S. Pat. Nos. 5,830,711, 6,027,889, 5,686,243, PCT Publication No. WO0056927A3, and PCT Publication No. WO9803673A1.

[0074] In some embodiments, amplification includes at least one cycle of the sequential procedures of: annealing at least one primer with complementary or substantially complementary sequences in at least one target nucleic acid; synthesizing at least one strand of nucleotides in a template-dependent manner using a polymerase; and denaturing the newly-formed nucleic acid duplex to separate the strands. The cycle may or may not be repeated. Amplification can include thermocycling or can be performed isothermally.

[0075] As used herein, the term “rolling circle amplification (RCA)” refers to a nucleic acid amplification reaction that amplifies a circular nucleic acid template (e.g., single-stranded DNA circles) via a rolling circle mechanism. Rolling circle amplification reaction is initiated by the hybridization of a primer to a circular, often single-stranded, nucleic acid template. The nucleic acid polymerase then extends the primer that is hybridized to the circular nucleic acid template by continuously progressing around the circular nucleic acid template to replicate the sequence of the nucleic acid template over and over again (rolling circle mechanism). The rolling circle amplification typically produces concatemers including tandem repeat units of the circular nucleic acid template sequence. The rolling circle amplification may be a linear RCA (LRCA), exhibiting linear amplification kinetics (e.g., RCA using a single specific primer), or may be an exponential RCA (ERCA) exhibiting exponential amplification kinetics. Rolling circle amplification may also be performed using multiple primers (multiply primed rolling circle amplification or MPRCA) leading to hyper-branched concatemers. For example, in a double-primed RCA, one primer may be complementary, as in the linear RCA, to the circular nucleic acid template, whereas the other may be complementary to the tandem repeat unit nucleic acid sequences of the RCA product. Consequently, the double-primed RCA may proceed as a chain reaction with exponential (geometric) amplification kinetics featuring a ramifying cascade of multiple-hybridization, primer-extension, and strand-displacement events involving both the primers. This often generates a discrete set of concatemeric, double-stranded nucleic acid amplification products. The rolling circle amplification may be performed in-vitro under isothermal conditions using a suitable nucleic acid polymerase such as Phi29 DNA polymerase. RCA may be performed by using any of the DNA polymerases that are known in the art (e.g., a Phi29 DNA polymerase, a Bst DNA polymerase, or SD polymerase).

[0076] As used herein, the term “circularizing” refers to the conversion of a linear nucleic acid molecule into a circular form. Circularization of a linear nucleic acid molecule, such as DNA or RNA, involves covalently linking the two ends of the molecule together to form a closed circle. Circularization may be obtained by, for example, association of complementary single stranded ends (sticky ends). Circularization may also be obtained by ligating the two ends of the linear nucleic acids. The ligation can be blunt-end ligation or sticky-end ligation. Circularizing may also be facilitated by the use of a splint oligonucleotide. For example, the two ends of a linear nucleic acid molecule are hybridized to two regions of a splint oligonucleotide such that the ends (i.e., the 5′ and 3′ ends) of the linear nucleic acid molecule are adjacent to each other, and a ligase is then used, for example, to covalently link the two ends together.

[0077] A nucleic acid can be amplified by a thermocycling method or by an isothermal amplification method. In some embodiments a rolling circle amplification method is used. In some embodiments amplification takes place on a solid support (e.g., within a flow cell) where a nucleic acid, nucleic acid library or portion thereof is immobilized. In certain sequencing methods, a nucleic acid library is added to a flow cell and immobilized by hybridization to anchors under suitable conditions. This type of nucleic acid amplification is often referred to as solid phase amplification. In some embodiments of solid phase amplification, all or a portion of the amplified products are synthesized by an extension initiating from an immobilized primer. Solid phase amplification reactions are analogous to standard solution phase amplifications except that at least one of the amplification oligonucleotides (e.g., primers) is immobilized on a solid support.

[0078] As used herein, the terms “cluster” and “colony” are used interchangeably to refer to a discrete site on a solid support that includes a plurality of immobilized polynucleotides and a plurality of immobilized complementary polynucleotides. The term “clustered array” refers to an array formed from such clusters or colonies. In this context the term “array” is not to be understood as requiring an ordered arrangement of clusters. The term “array” is used in accordance with its ordinary meaning in the art, and refers to a population of different molecules that are attached to one or more solid-phase substrates such that the different molecules can be differentiated from each other according to their relative location. An array can include different molecules that are each located at different addressable features on a solid-phase substrate. The molecules of the array can be nucleic acid primers, nucleic acid probes, nucleic acid templates or nucleic acid enzymes such as polymerases or ligases. Arrays useful in the invention can have densities that ranges from about 2 different features to many millions, billions or higher. The density of an array can be from 2 to as many as a billion or more different features per square cm. For example an array can have at least about 100 features/cm², at least about 1,000 features/cm², at least about 10,000 features/cm², at least about 100,000 features/cm², at least about 10,000,000 features/cm², at least about 100,000,000 features/cm², at least about 1,000,000,000 features/cm², at least about 2,000,000,000 features/cm² or higher. In embodiments, the arrays have features at any of a variety of densities including, for example, at least about 10 features/cm², 100 features/cm², 500 features/cm², 1,000 features/cm², 5,000 features/cm², 10,000 features/cm², 50,000 features/cm², 100,000 features/cm², 1,000,000 features/cm², 5,000,000 features/cm², or higher.

[0079] Provided herein are methods, systems, and compositions for analyzing a sample (e.g., sequencing nucleic acids within a sample) in situ. The term “in situ” is used in accordance with its ordinary meaning in the art and refers to a sample surrounded by at least a portion of its native environment, such as may preserve the relative position of two or more elements. For example, an extracted human cell obtained is considered in situ when the cell is retained in its local microenvironment so as to avoid extracting the target (e.g., nucleic acid molecules or proteins) away from their native environment. An in situ sample (e.g., a cell) can be obtained from a suitable subject. An in situ cell sample may refer to a cell and its surrounding milieu, or a tissue. A sample can be isolated or obtained directly from a subject or part thereof. In embodiments, the methods described herein (e.g., sequencing a plurality of target nucleic acids of a cell in situ) are applied to an isolated cell (i.e., a cell not surrounded by least a portion of its native environment). For the avoidance of any doubt, when the method is performed within a cell (e.g., an isolated cell) the method may be considered in situ. In some embodiments, a sample is obtained indirectly from an individual or medical professional. A sample can be any specimen that is isolated or obtained from a subject or part thereof. A sample can be any specimen that is isolated or obtained from multiple subjects. Non-limiting examples of tissues include organ tissues (e.g., liver, kidney, lung, thymus, adrenals, skin, bladder, reproductive organs, intestine, colon, spleen, brain, the like or parts thereof), epithelial tissue, hair, hair follicles, ducts, canals, bone, eye, nose, mouth, throat, ear, nails, the like, parts thereof or combinations thereof. A sample may include cells or tissues that are normal, healthy, diseased (e.g., infected), and/or cancerous (e.g., cancer cells). A sample obtained from a subject may include cells or cellular material (e.g., nucleic acids) of multiple organisms (e.g., virus nucleic acid, fetal nucleic acid, bacterial nucleic acid, parasite nucleic acid). A sample may include a cell and RNA transcripts. A sample can include nucleic acids obtained from one or more subjects. In some embodiments a sample includes nucleic acid obtained from a single subject. A subject can be any living or non-living organism, including but not limited to a human, non-human animal, plant, bacterium, fungus, virus, or protist. A subject may be any age (e.g., an embryo, a fetus, infant, child, adult). A subject can be of any sex (e.g., male, female, or combination thereof). A subject may be pregnant. In some embodiments, a subject is a mammal. In some embodiments, a subject is a plant. In some embodiments, a subject is a human subject. A subject can be a patient (e.g., a human patient). In some embodiments a subject is suspected of having a genetic variation or a disease or condition associated with a genetic variation.

[0080] As used herein, the term “disease state” is used in accordance with its plain and ordinary meaning and, in the context of the present disclosure, refers specifically to inflammatory bowel disease (IBD) and related pathological conditions of the gastrointestinal tract. A disease state may include ulcerative colitis, Crohn's disease, indeterminate colitis, and associated complications such as strictures, fistulas, fibrosis, and neoplasia. The presence of a disease state may be identified by the same collection of biological constituents used to determine the biological state of a cell or tissue, including nucleic acid molecules, proteins, and spatial patterns of expression within affected mucosa. In general, an IBD disease state is detrimental to the biological system of the gut, leading to chronic inflammation, architectural distortion of tissue, and disruption of barrier function. The IBD disease state can be a consequence of immune dysregulation, genetic predisposition, and environmental triggers, and is characterized by the aberrant interplay of epithelial cells, stromal cells, and multiple immune cell lineages, including T cells, B cells, macrophages, and dendritic cells. In some embodiments, the IBD disease state is associated with alterations in the expression of pro-inflammatory cytokines such as TNF, IL1B, IL6, IL17A, and IFNG, together with changes in anti-inflammatory mediators such as IL10 and FOXP3. Spatial clustering of such transcripts, particularly within colonic crypts, granulomas, Peyer's patches, or fibrotic lesions, provides characteristic molecular signatures of the disease. Disease states are monitored to determine the level or severity of IBD, including activity, extent, or progression of inflammation, and more specifically, to detect changes in the biological state of a subject that are correlated with therapeutic response or resistance. In embodiments, methods provided herein are applicable to monitoring the IBD disease state in subjects undergoing therapies, such as anti-TNF agents, IL-12/23 inhibitors, integrin blockers, or emerging biologic or small molecule interventions. Thus, the present disclosure also provides, in some embodiments, methods for determining or monitoring the efficacy of an IBD therapy (i.e., determining a level of therapeutic effect) upon a subject. These methods may be applied in clinical practice or in a clinical trial setting, serving as an early surrogate marker for therapeutic success or failure. Within inflamed tissues of IBD, there are hundreds to thousands of signaling pathways that are interconnected, and perturbations in the function of proteins or transcripts within a single pathway often produce compensatory changes in many others. Accordingly, the disruption or modulation of even a single gene or protein, whether by disease activity or therapeutic intervention, results in characteristic compensatory changes that can be detected at the transcript or protein level. These changes form a molecular “signature” of IBD or of a therapeutic response, which can be identified even at early stages where histological or endoscopic changes may not yet be apparent.

[0081] The terms “polypeptide,” “peptide” and “protein” are used interchangeably herein to refer to a polymer of amino acid residues, wherein the polymer may optionally be conjugated to a moiety that does not consist of amino acids. The terms apply to amino acid polymers in which one or more amino acid residue is an artificial chemical mimetic of a corresponding naturally occurring amino acid, as well as to naturally occurring amino acid polymers and non-naturally occurring amino acid polymer. A protein may refer to a protein expressed in a cell.

[0082] A polypeptide, or a cell is “recombinant” when it is artificial or engineered, or derived from or contains an artificial or engineered protein or nucleic acid (e.g., non-natural or not wild type). For example, a polynucleotide that is inserted into a vector or any other heterologous location, e.g., in a genome of a recombinant organism, such that it is not associated with nucleotide sequences that normally flank the polynucleotide as it is found in nature is a recombinant polynucleotide. A protein expressed in vitro or in vivo from a recombinant polynucleotide is an example of a recombinant polypeptide. Likewise, a polynucleotide sequence that does not appear in nature, for example a variant of a naturally occurring gene, is recombinant.

[0083] As used herein, a “single cell” refers to one cell. Single cells useful in the methods described herein can be obtained from a tissue of interest, or from a biopsy, blood sample, or cell culture. Additionally, cells from specific organs, tissues, tumors, neoplasms, or the like can be obtained and used in the methods described herein. In general, cells from any population can be used in the methods, such as a population of prokaryotic or eukaryotic organisms, including bacteria or yeast.

[0084] The term “cellular component” is used in accordance with its ordinary meaning in the art and refers to any organelle, nucleic acid, protein, or analyte that is found in a prokaryotic, eukaryotic, archaeal, or other organismic cell type. Examples of cellular components (e.g., a component of a cell) include RNA transcripts, proteins, membranes, lipids, and other analytes.

[0085] A “gene” refers to a polynucleotide that is capable of conferring biological function after being transcribed and/or translated. A “gene” refers to a polynucleotide sequence that is capable of conferring biological function after being transcribed and/or translated. Functionally, a genome is subdivided into genes. Each gene is a nucleic acid sequence that encodes an RNA or polypeptide. A gene is transcribed from DNA into RNA, which can either be non-coding (ncRNA) with a direct function, or an intermediate messenger (mRNA) that is then translated into protein. Typically a gene includes multiple sequence elements, such as for example, a coding element (i.e., a sequence that encodes a functional protein), non-coding element, and regulatory element. Each element may be as short as a few bp to 5 kb. In embodiments, the gene is the protein coding sequence of RNA. Non-limiting examples of genes include developmental genes (e.g., adhesion molecules, cyclin kinase inhibitors, Wnt family members, Pax family members, Winged helix family members, Hox family members, cytokines/lymphokines and their receptors, growth/differentiation factors and their receptors, neurotransmitters and their receptors); oncogenes (e.g., ABL1, BCL1, BCL2, BCL6, CBFA2, CBL, CSF1R, ERBA, ERBB, ERBB2, ETS1, ETS1, ETV6, FGR, FOS, FYN, HCR, HRAS, JUN, KRAS, LCK, LYN, MDM2, MLL, MYB, MYC, MYCL1, MYCN, NRAS, PIM1, PML, RET, SRC, TAL1, TCL3, and YES); tumor suppressor genes (e.g., APC, BRCA1, BRCA2, MADH4, MCC, NF1, NF2, RB1, TP53, and WT1); and enzymes (e.g., ACC synthases and oxidases, ACP desaturases and hydroxylases, ADP-glucose pyrophorylases, ATPases, alcohol dehydrogenases, amylases, amyloglucosidases, catalases, cellulases, chalcone synthases, chitinases, cyclooxygenases, decarboxylases, dextrinases, DNA and RNA polymerases, galactosidases, glucanases, glucose oxidases, granule-bound starch synthases, GTPases, helicases, hemicellulases, integrases, inulinases, invertases, isomerases, kinases, lactases, lipases, lipoxygenases, lysozymes, nopaline synthases, octopine synthases, pectinesterases, peroxidases, phosphatases, phospholipases, phosphorylases, phytases, plant growth regulator synthases, polygalacturonases, proteinases and peptidases, pullanases, recombinases, reverse transcriptases, RUBISCOs, topoisomerases, and xylanases). In embodiments, a gene includes at least one mutation associated with a disease or condition mediated by a mutant form of the gene.

[0086] As used herein, the terms “biomolecule” or “analyte” refer to an agent (e.g., a compound, macromolecule, or small molecule), and the like derived from a biological system (e.g., an organism, a cell, or a tissue). The biomolecule may contain multiple individual components that collectively construct the biomolecule, for example, in embodiments, the biomolecule is a polynucleotide wherein the polynucleotide is composed of nucleotide monomers. The biomolecule may be or may include DNA, RNA, organelles, carbohydrates, lipids, proteins, or any combination thereof. These components may be extracellular. In some examples, the biomolecule may be referred to as a clump or aggregate of combinations of components. In some instances, the biomolecule may include one or more constituents of a cell but may not include other constituents of the cell. In embodiments, a biomolecule is a molecule produced by a biological system (e.g., an organism). The biomolecule may be any substance (e.g. molecule) or entity that is desired to be detected by the method of the invention. In embodiments, the biomolecule is the “target” of the assay methods described herein. The biomolecule may accordingly be any compound that may be desired to be detected, for example a peptide or protein, or nucleic acid molecule or a small molecule, including organic and inorganic molecules. The biomolecule may be a cell or a microorganism, including a virus, or a fragment or product thereof. Biomolecules of particular interest may thus include proteinaceous molecules such as peptides, polypeptides, proteins or prions or any molecule which includes a protein or polypeptide component, etc., or fragments thereof. The biomolecule may be a single molecule or a complex that contains two or more molecular subunits, which may or may not be be covalently bound to one another, and which may be the same or different. Thus, in addition to cells or microorganisms, such a complex biomolecule may also be a protein complex. Such a complex may thus be a homo- or hetero-multimer. Aggregates of molecules e.g., proteins may also be target analytes, for example aggregates of the same protein or different proteins. The biomolecule may also be a complex between proteins or peptides and nucleic acid molecules such as DNA or RNA. Of particular interest may be the interactions between proteins and nucleic acids, e.g., regulatory factors, such as transcription factors, and interactions between DNA or RNA molecules

[0087] As used herein, “biomaterial” refers to any biological material produced by an organism. In some embodiments, biomaterial includes secretions, extracellular matrix, proteins, lipids, organelles, membranes, cells, portions thereof, and combinations thereof. In some embodiments, cellular material includes secretions, extracellular matrix, proteins, lipids, organelles, membranes, cells, portions thereof, and combinations thereof. In some embodiments, biomaterial includes viruses. In some embodiments, the biomaterial is a replicating virus and thus includes virus infected cells. In embodiments, a biological sample includes biomaterials.

[0088] In some embodiments, a sample includes one or more nucleic acids, or fragments thereof. A sample can include nucleic acids obtained from one or more subjects. In some embodiments a sample includes nucleic acid obtained from a single subject. In some embodiments, a sample includes a mixture of nucleic acids. A mixture of nucleic acids can include two or more nucleic acid species having different nucleotide sequences, different fragment lengths, different origins (e.g., genomic origins, cell or tissue origins, subject origins, the like or combinations thereof), or combinations thereof. A sample may include synthetic nucleic acid.

[0089] A subject can be any living or non-living organism, including but not limited to a human, non-human animal, plant, bacterium, fungus, virus or protist. A subject may be any age (e.g., an embryo, a fetus, infant, child, adult). A subject can be of any sex (e.g., male, female, or combination thereof). A subject may be pregnant. In some embodiments, a subject is a mammal. In some embodiments, a subject is a human subject. A subject can be a patient (e.g., a human patient). In some embodiments a subject is suspected of having a genetic variation or a disease or condition associated with a genetic variation.

[0090] The methods and kits of the present disclosure may be applied, mutatis mutandis, to the sequencing of RNA, or to determining the identity of a ribonucleotide.

[0091] As used herein, the term “kit” refers to any delivery system for delivering materials. In the context of reaction assays, such delivery systems include systems that allow for the storage, transport, or delivery of reaction reagents (e.g., oligonucleotides, enzymes, etc. in the appropriate containers) and/or supporting materials (e.g., packaging, buffers, written instructions for performing a method, etc.) from one location to another. For example, kits include one or more enclosures (e.g., boxes) containing the relevant reaction reagents and/or supporting materials. As used herein, the term “fragmented kit” refers to a delivery system including two or more separate containers that each contain a subportion of the total kit components. The containers may be delivered to the intended recipient together or separately. For example, a first container may contain an enzyme for use in an assay, while a second container contains oligonucleotides. In contrast, a “combined kit” refers to a delivery system containing all of the components of a reaction assay in a single container (e.g., in a single box housing each of the desired components). The term “kit” includes both fragmented and combined kits.

[0092] As used herein the term “determine” can be used to refer to the act of ascertaining, establishing or estimating. A determination can be probabilistic. For example, a determination can have an apparent likelihood of at least 50%, 75%, 90%, 95%, 98%, 99%, 99.9% or higher. In some cases, a determination can have an apparent likelihood of 100%. An exemplary determination is a maximum likelihood analysis or report. As used herein, the term “identify,” when used in reference to a thing, can be used to refer to recognition of the thing, distinction of the thing from at least one other thing or categorization of the thing with at least one other thing. The recognition, distinction or categorization can be probabilistic. For example, a thing can be identified with an apparent likelihood of at least 50%, 75%, 90%, 95%, 98%, 99%, 99.9% or higher. A thing can be identified based on a result of a maximum likelihood analysis. In some cases, a thing can be identified with an apparent likelihood of 100%.

[0093] The terms “bioconjugate group,” “bioconjugate reactive moiety,” and “bioconjugate reactive group” refer to a chemical moiety which participates in a reaction to form a bioconjugate linker (e.g., covalent linker).

[0094] As used herein, the term “bioconjugate reactive moiety” and “bioconjugate reactive group” refers to a moiety or group capable of forming a bioconjugate (e.g., covalent linker) as a result of the association between atoms or molecules of bioconjugate reactive groups. The association can be direct or indirect. For example, a conjugate between a first bioconjugate reactive group (e.g., —NH₂, —COOH, —N-hydroxysuccinimide, or -maleimide) and a second bioconjugate reactive group (e.g., sulfhydryl, sulfur-containing amino acid, amine, amine sidechain containing amino acid, or carboxylate) provided herein can be direct, e.g., by covalent bond or linker (e.g., a first linker of second linker), or indirect, e.g., by non-covalent bond (e.g., electrostatic interactions (e.g., ionic bond, hydrogen bond, halogen bond), van der Waals interactions (e.g., dipole-dipole, dipole-induced dipole, London dispersion), ring stacking (pi effects), hydrophobic interactions and the like). In embodiments, bioconjugates or bioconjugate linkers are formed using bioconjugate chemistry (i.e., the association of two bioconjugate reactive groups) including, but are not limited to nucleophilic substitutions (e.g., reactions of amines and alcohols with acyl halides, active esters), electrophilic substitutions (e.g., enamine reactions) and additions to carbon-carbon and carbon-heteroatom multiple bonds (e.g., Michael reaction, Diels-Alder addition). These and other useful reactions are discussed in, for example, March, ADVANCED ORGANIC CHEMISTRY, 3rd Ed., John Wiley & Sons, New York, 1985; Hermanson, BIOCONJUGATE TECHNIQUES, Academic Press, San Diego, 1996; and Feeney et al., MODIFICATION OF PROTEINS; Advances in Chemistry Series, Vol. 198, American Chemical Society, Washington, D.C., 1982. In embodiments, the first bioconjugate reactive group (e.g., maleimide moiety) is covalently attached to the second bioconjugate reactive group (e.g., a sulfhydryl). In embodiments, the first bioconjugate reactive group (e.g., haloacetyl moiety) is covalently attached to the second bioconjugate reactive group (e.g., a sulfhydryl). In embodiments, the first bioconjugate reactive group (e.g., pyridyl moiety) is covalently attached to the second bioconjugate reactive group (e.g., a sulfhydryl). In embodiments, the first bioconjugate reactive group (e.g., —N-hydroxysuccinimide moiety) is covalently attached to the second bioconjugate reactive group (e.g., an amine). In embodiments, the first bioconjugate reactive group (e.g., maleimide moiety) is covalently attached to the second bioconjugate reactive group (e.g., a sulfhydryl). In embodiments, the first bioconjugate reactive group (e.g., -sulfo-N-hydroxysuccinimide moiety) is covalently attached to the second bioconjugate reactive group (e.g., an amine).

[0095] Useful bioconjugate reactive groups used for bioconjugate chemistries herein include, for example: (a) carboxyl groups and various derivatives thereof including, but not limited to, N-hydroxysuccinimide esters, N-hydroxybenztriazole esters, acid halides, acyl imidazoles, thioesters, p-nitrophenyl esters, alkyl, alkenyl, alkynyl and aromatic esters; (b) hydroxyl groups which can be converted to esters, ethers, aldehydes, etc.; (c) haloalkyl groups wherein the halide can be later displaced with a nucleophilic group such as, for example, an amine, a carboxylate anion, thiol anion, carbanion, or an alkoxide ion, thereby resulting in the covalent attachment of a new group at the site of the halogen atom; (d) dienophile groups which are capable of participating in Diels-Alder reactions such as, for example, maleimido or maleimide groups; (e) aldehyde or ketone groups such that subsequent derivatization is possible via formation of carbonyl derivatives such as, for example, imines, hydrazones, semicarbazones or oximes, or via such mechanisms as Grignard addition or alkyllithium addition; (f) sulfonyl halide groups for subsequent reaction with amines, for example, to form sulfonamides; (g) thiol groups, which can be converted to disulfides, reacted with acyl halides, or bonded to metals such as gold, or react with maleimides; (h) amine or sulfhydryl groups (e.g., present in cysteine), which can be, for example, acylated, alkylated or oxidized; (i) alkenes, which can undergo, for example, cycloadditions, acylation, Michael addition, etc.; (j) epoxides, which can react with, for example, amines and hydroxyl compounds; (k) phosphoramidites and other standard functional groups useful in nucleic acid synthesis; (l) metal silicon oxide bonding; (m) metal bonding to reactive phosphorus groups (e.g., phosphines) to form, for example, phosphate diester bonds; (n) azides coupled to alkynes using copper catalyzed cycloaddition click chemistry; (o) biotin conjugate can react with avidin or strepavidin to form a avidin-biotin complex or streptavidin-biotin complex.

[0096] An “antibody” (Ab) is a protein that binds specifically to a particular substance, known as an “antigen” (Ag). An “antibody” or “antigen-binding fragment” is an immunoglobulin that binds a specific “epitope.” The term encompasses polyclonal, monoclonal, and chimeric antibodies. In nature, antibodies are generally produced by lymphocytes in response to immune challenge, such as by infection or immunization. An “antigen” (Ag) is any substance that reacts specifically with antibodies or T lymphocytes (T cells). An antibody may include the entire antibody as well as any antibody fragments capable of binding the antigen or antigenic fragment of interest. Examples include complete antibody molecules, antibody fragments, such as Fab, F(ab′)2, CDRs, VL, VH, and any other portion of an antibody which is capable of specifically binding to an antigen. Antibodies used herein are immunospecific for, and therefore specifically and selectively bind to, for example, proteins either detected (e.g., biological targets of interest) or used for detection (e.g., probes containing oligonucleotide barcodes) in the methods and devices as described herein.

[0097] The term “covalent linker” is used in accordance with its ordinary meaning and refers to a divalent moiety which connects at least two moieties to form a molecule.

[0098] The term “non-covalent linker” is used in accordance with its ordinary meaning and refers to a divalent moiety which includes at least two molecules that are not covalently linked to each other but are capable of interacting with each other via a non-covalent bond (e.g., electrostatic interactions (e.g., ionic bond, hydrogen bond, halogen bond) or van der Waals interactions (e.g., dipole-dipole, dipole-induced dipole, London dispersion). In embodiments, the non-covalent linker is the result of two molecules that are not covalently linked to each other that interact with each other via a non-covalent bond.

[0099] As used herein a “genetically modifying agent” is a substance that alters the genetic sequence of a cell following exposure to the cell, resulting in an agent-mediated nucleic acid sequence. In embodiments, the genetically modifying agent is a small molecule, protein, pathogen (e.g., virus or bacterium), toxin, oligonucleotide, or antigen. In embodiments, the genetically modifying agent is a virus (e.g., influenza) and the agent-mediated nucleic acid sequence is the nucleic acid sequence that develops within a T-cell upon cellular exposure and contact with the virus. In embodiments, the genetically modifying agent modulates the expression of a nucleic acid sequence in a cell relative to a control (e.g., the absence of the genetically modifying agent).

[0100] Where a range of values is provided, it is understood that each intervening value, to the tenth of the unit of the lower limit unless the context clearly indicates otherwise, between the upper and lower limit of that range, and any other stated or unstated intervening value in, or smaller range of values within, that stated range is encompassed within the invention. The upper and lower limits of any such smaller range (within a more broadly recited range) may independently be included in the smaller ranges, or as particular values themselves, and are also encompassed within the invention, subject to any specifically excluded limit in the stated range. Where the stated range includes one or both of the limits, ranges excluding either or both of those included limits are also included in the invention.

[0101] As used herein, the term “upstream” refers to a region in the nucleic acid sequence that is towards the 5′ end of a particular reference point, and the term “downstream” refers to a region in the nucleic acid sequence that is toward the 3′ end of the reference point.

[0102] As used herein, the terms “incubate,” and “incubation refer collectively to altering the temperature of an object in a controlled manner such that conditions are sufficient for conducting the desired reaction. Thus, it is envisioned that the terms encompass heating a receptacle (e.g., a microplate) to a desired temperature and maintaining such temperature for a fixed time interval. Also included in the terms is the act of subjecting a receptacle to one or more heating and cooling cycles (i.e., “temperature cycling” or “thermal cycling”). While temperature cycling typically occurs at relatively high rates of change in temperature, the term is not limited thereto, and may encompass any rate of change in temperature.

[0103] As used herein, “biological activity” may include the in vivo activities of a compound or physiological responses that result upon in vivo administration of a compound, composition or other mixture. Biological activity, thus, may encompass therapeutic effects and pharmaceutical activity of such compounds, compositions and mixtures. Biological activities may be observed in vitro systems designed to test or use such activities.

[0104] The term “isolated” means altered or removed from the natural state. For example, a nucleic acid or a polypeptide naturally present in a living animal is not isolated, but the same nucleic acid or polypeptide partially or completely separated from the coexisting materials of its natural state is isolated. An isolated nucleic acid or protein can exist in substantially purified form, or can exist in a non-native environment such as, for example, a host cell. In embodiments, “isolated” refers to a nucleic acid, polynucleotide, polypeptide, protein, or other component that is partially or completely separated from components with which it is normally associated (other proteins, nucleic acids, cells, etc.).

[0105] The term “synthetic target” as used herein refers to a modified protein or nucleic acid such as those constructed by synthetic methods. In embodiments, a synthetic target is artificial or engineered, or derived from or contains an artificial or engineered protein or nucleic acid (e.g., non-natural or not wild type). For example, a polynucleotide that is inserted or removed such that it is not associated with nucleotide sequences that normally flank the polynucleotide as it is found in nature is a synthetic target polynucleotide.

[0106] The term “nucleic acid sequencing device” and the like means an integrated system of one or more chambers, ports, and channels that are interconnected and in fluid communication and designed for carrying out an analytical reaction or process, either alone or in cooperation with an appliance or instrument that provides support functions, such as sample introduction, fluid and/or reagent driving means, temperature control, detection systems, data collection and/or integration systems, for the purpose of determining the nucleic acid sequence of a template polynucleotide. Nucleic acid sequencing devices may further include valves, pumps, and specialized functional coatings on interior walls. Nucleic acid sequencing devices may include a receiving unit, or platen, that orients the flow cell such that a maximal surface area of the flow cell is available to be exposed to an optical lens. Other nucleic acid sequencing devices include those provided by Singular Genomics™ (e.g., the G4™ or G4X™ system), Illumina™ (e.g., HiSeq™, MiSeq™, NextSeq™, or NovaSeq™ systems), Life Technologies™ (e.g., ABI PRISM™, or SOLiD™ systems), Pacific Biosciences (e.g., systems using SMRT™ Technology such as the Sequel™ or RS II™ systems), or Qiagen (e.g., Genereader™ system). Nucleic acid sequencing devices may further include fluidic reservoirs (e.g., bottles), valves, pressure sources, pumps, sensors, control systems, valves, pumps, and specialized functional coatings on interior walls. In embodiments, the device includes a plurality of a sequencing reagent reservoirs and a plurality of clustering reagent reservoirs. In embodiments, the clustering reagent reservoir includes amplification reagents (e.g., an aqueous buffer containing enzymes, salts, and nucleotides, denaturants, crowding agents, etc.) In embodiments, the reservoirs include sequencing reagents (such as an aqueous buffer containing enzymes, salts, and nucleotides); a wash solution (an aqueous buffer); a cleave solution (an aqueous buffer containing a cleaving agent, such as a reducing agent); or a cleaning solution (a dilute bleach solution, dilute NaOH solution, dilute HCl solution, dilute antibacterial solution, or water). The fluid of each of the reservoirs can vary. The fluid can be, for example, an aqueous solution which may contain buffers (e.g., saline-sodium citrate (SSC), ascorbic acid, tris(hydroxymethyl)aminomethane or “Tris”), aqueous salts (e.g., KCl or (NH₄)₂SO₄)), nucleotides, polymerases, cleaving agent (e.g., tri-n-butyl-phosphine, triphenyl phosphine and its sulfonated versions (i.e., tris(3-sulfophenyl)-phosphine, TPPTS), and tri(carboxyethyl)phosphine (TCEP) and its salts, cleaving agent scavenger compounds (e.g., 2′-Dithiobisethanamine or 11-Azido-3,6,9-trioxaundecane-1-amine), chelating agents (e.g., EDTA), detergents, surfactants, crowding agents, or stabilizers (e.g., PEG, Tween, BSA). Non-limited examples of reservoirs include cartridges, pouches, vials, containers, and eppendorf tubes. In embodiments, the device is configured to perform fluorescent imaging. In embodiments, the device includes one or more light sources (e.g., one or more lasers). In embodiments, the illuminator or light source is a radiation source (i.e., an origin or generator of propagated electromagnetic energy) providing incident light to the sample. A radiation source can include an illumination source producing electromagnetic radiation in the ultraviolet (UV) range (about 200 to 390 nm), visible (VIS) range (about 390 to 770 nm), or infrared (IR) range (about 0.77 to 25 microns), or other range of the electromagnetic spectrum. In embodiments, the illuminator or light source is a lamp such as an arc lamp or quartz halogen lamp. In embodiments, the illuminator or light source is a coherent light source. In embodiments, the light source is a laser, LED (light emitting diode), a mercury or tungsten lamp, or a super-continuous diode. In embodiments, the light source provides excitation beams having a wavelength between 200 nm to 1500 nm. In embodiments, the laser provides excitation beams having a wavelength of 405 nm, 470 nm, 488 nm, 514 nm, 520 nm, 532 nm, 561 nm, 633 nm, 639 nm, 640 nm, 800 nm, 808 nm, 912 nm, 1024 nm, or 1500 nm. In embodiments, the illuminator or light source is a light-emitting diode (LED). The LED can be, for example, an Organic Light Emitting Diode (OLED), a Thin Film Electroluminescent Device (TFELD), or a Quantum dot based inorganic organic LED. The LED can include a phosphorescent OLED (PHOLED). In embodiments, the nucleic acid sequencing device includes an imaging system (e.g., an imaging system as described herein). The imaging system capable of exciting one or more of the identifiable labels (e.g., a fluorescent label) linked to a nucleotide and thereafter obtain image data for the identifiable labels. The image data (e.g., detection data) may be analyzed by another component within the device. The imaging system may include a system described herein and may include a fluorescence spectrophotometer including an objective lens and/or a solid-state imaging device. The solid-state imaging device may include a charge coupled device (CCD) and/or a complementary metal oxide semiconductor (CMOS). The system may also include circuitry and processors, including systems using microcontrollers, reduced instruction set computers (RISC), application specific integrated circuits (ASICs), field programmable gate array (FPGAs), logic circuits, and any other circuit or processor capable of executing functions described herein. The set of instructions may be in the form of a software program. As used herein, the terms “software” and “firmware” are interchangeable, and include any computer program stored in memory for execution by a computer, including RAM memory, ROM memory, EPROM memory, EEPROM memory, and non-volatile RAM (NVRAM) memory. In embodiments, the device includes a thermal control assembly useful to control the temperature of the reagents.

[0107] The term “image” is used according to its ordinary meaning and refers to a representation of all or part of an object. The representation may be an optically detected reproduction. For example, an image can be obtained from fluorescent, luminescent, scatter, or absorption signals. The part of the object that is present in an image can be the surface or other xy plane of the object. Typically, an image is a 2 dimensional representation of a 3 dimensional object. An image may include signals at differing intensities (i.e., signal levels). An image can be provided in a computer readable format or medium. An image is derived from the collection of focus points of light rays coming from an object (e.g., the sample), which may be detected by any image sensor.

[0108] As used herein, the term “signal” is intended to include, for example, fluorescent, luminescent, scatter, or absorption impulse or electromagnetic wave transmitted or received. Signals can be detected in the ultraviolet (UV) range (about 200 to 390 nm), visible (VIS) range (about 391 to 770 nm), infrared (IR) range (about 0.771 to 25 microns), or other range of the electromagnetic spectrum. The term “signal level” refers to an amount or quantity of detected energy or coded information. For example, a signal may be quantified by its intensity, wavelength, energy, frequency, power, luminance, or a combination thereof. Other signals can be quantified according to characteristics such as voltage, current, electric field strength, magnetic field strength, frequency, power, temperature, etc. Absence of signal is understood to be a signal level of zero or a signal level that is not meaningfully distinguished from noise.

[0109] The term “xy coordinates” refers to information that specifies location, size, shape, and/or orientation in an xy plane. The information can be, for example, numerical coordinates in a Cartesian system. The coordinates can be provided relative to one or both of the x and y axes or can be provided relative to another location in the xy plane (e.g., a fiducial). The term “xy plane” refers to a 2 dimensional area defined by straight line axes x and y. When used in reference to a detecting apparatus and an object observed by the detector, the xy plane may be specified as being orthogonal to the direction of observation between the detector and object being detected.

[0110] As used herein, the term “tissue section” refers to a piece of tissue that has been obtained from a subject, optionally fixed and attached to a surface, e.g., a microscope slide.

[0111] As used herein, the term “data string” refers to a sequence of characters derived from a biological or computational data set, such as nucleotide sequences representing candidate probe segments. Each data string may comprise alphanumeric characters, symbols, or encoded representations corresponding to nucleotides or other sequence-based identifiers. The term “collection,” when used in reference to data strings, refers to one or more data strings grouped, organized, or processed together. A collection may comprise data strings derived from a single data set or from two or more distinct data sets. In one example, a collection of data strings may include candidate oligonucleotide sequences generated from exonic regions of a target gene. In another example, a collection may include sequences derived from multiple target genes or reference genomes. As used herein, a “plurality of data strings” refers to two or more data strings. Each data string may correspond to a candidate probe sequence comprising a first segment and a second segment, each segment having a length between 15 and 20 nucleotides, as described in the methods herein.

[0112] As used herein, a “subsequence”, “substring”, “prefix” or “suffix” of a string represents a subset of characters, letters, words, etc., of a longer list of characters, letters, words, etc., (i.e., the longer list being the sequence or string) wherein the order of the elements is preserved. A “prefix” typically refers to a subset of characters, letters, numbers, etc. found at the beginning of a sequence or string, whereas a “suffix” typically refers to a subset of characters, letters, numbers, etc. found at the end of a string. Substrings are also known as subwords or factors of a sequence or string.

[0113] As used herein, the term “weak base” refers to refers to adenine (A) and thymine (T) bases as these nitrogenous bases form two hydrogen bond pairs and thus weaker bonds compared to the guanine (G) or cytosine (C) bases pairs.

[0114] As used herein, the term “strong base” refers to guanine (G) or cytosine (C) bases as these nitrogenous bases form three hydrogen bond pairs and thus stronger bonds compared to the adenine (A) and thymine (T) base pairs.

[0115] As used herein, the term “predicted melting temperature” or “melting temperature” or “Tm” refers to a computationally estimated temperature at which 50% of an oligonucleotide is expected to dissociate from its complementary strand under hybridization conditions (e.g., oligonucleotide concentration, ionic strength (e.g., sodium or magnesium ion concentration), pH, and/or solvent environment). The predicted melting temperature is calculated using thermodynamic models that account for sequence-specific hybridization stability, including base pairing and nearest-neighbor stacking interactions.

[0116] The term “organelle” as used herein refers to an entity of cell associated with a particular function. In embodiments, an organelle refers to a specialized subunit within a cell that has a specific function, and is usually separately enclosed within its own lipid bilayer. Examples of organelles include the nucleus, mitochondria, endoplasmic reticulum, Golgi apparatus, lysosomes, and chloroplasts (in plant cells). Although most organelles are functional units within cells, some organelles function extend outside of cells, such as cilia, flagellum, archaellum, and the trichocyst. In embodiments, the organelle is a membrane bound organelle. In embodiments, the organelle is a non-membrane bound organelle. Non-membrane bounded organelles, also called biomolecular complexes, are assemblies of macromolecules such as the ribosome, the spliceosome, the proteasome, the nucleosome, and the centriole. Commonly detected organelles includes the nucleus, which is often visualized using dyes such as DAPI, Hoechst, and SYTO™ Green, mitochondria are with MitoTracker™ dyes and Rhodamine 123, endoplasmic reticulum (ER) utilizing dyes like ER-Tracker® Green/Red or DiOC6, the Golgi apparatus is stained with BODIPY™ FL C5-Ceramide and NBD C6-Ceramide, lysosomes are typically stained using LysoTracker™ dyes and Acridine Orange, and peroxisomes may be stained with Peroxisome-Tracker® Red and Peroxy Green dyes. Although not membrane-bound, ribosomes may detected using antibodies such as anti-RPL10 or anti-RPS6. Additionally, the cytoskeleton, specifically actin filaments, is frequently stained to study cell shape with Phalloidin conjugates and Alexa Fluor® Phalloidin being widely used. In embodiments, the organelle is a biomolecular complex including a plurality of subunits. In embodiments, the organelle is a macromolecule. In embodiments, the organelle is a eukaryotic organelle. In embodiments, the organelle is the cell membrane, the endoplasmic reticulum, a flagellum, a Golgi apparatus, a mitochondria, the nucleus, a vacuole. In embodiments, the organelle is a lysosome. In embodiments, the organelle is the nucleolus.

[0117] The term “conjugate” is used in its accordance with its plain and ordinary meaning and refers to a composition containing at least two components linked together. The individual components may be linked directly through one or more covalent bonds, or one or more ionic bonds, or by chelation, or mixtures thereof. The linkage, or conjugation, may include one or more spacer groups between the one or more linkages joining the one or more individual components, or may be between the individual component and the linkage. The individual components that may be linked together may include biologically derived biopolymers, modified biopolymers, biologically derived biomolecules, and synthetically derived molecules. For example, the conjugate may comprise a first component, such as a protein, that may be linked, i.e., conjugated, directly through one or more covalent bonds to a second component, such as an oligonucleotide, to form a conjugate. The conjugate and/or the linkage of the conjugate may be stable to thermolysis, stable to hydrolysis, may be biocompatible, or combinations thereof.

[0118] The term “computing device” is used herein to refer to an electronic device equipped with at least a processor. Examples of computing devices may include system or device described herein, mobile devices (e.g., cellular telephones, wearable devices, smartphones, smartwatches, web-pads, tablet computers, Internet enabled cellular telephones, Wi-Fi® enabled electronic devices, personal data assistants (PDAs), laptop computers, etc.), personal computers, and server computing devices. In various embodiments, computing devices may be configured with memory and/or storage as well as networking capabilities, such as network transceiver(s) and antenna(s) configured to establish a wide area network (WAN) connection (e.g., a cellular network connection, etc.) and/or a local area network (LAN) connection (e.g., a wired/wireless connection to the Internet via a Wi-Fi® router, etc.). In embodiments, the computing device is a mobile device, such as a cellular telephone, wearable device, or smartphone (e.g., iPhone, Android, Blackberry, Palm, Symbian, or Windows).

[0119] As used in this application, the terms “component”, “module”, “system”, and the like are intended to refer to a computer-related entity, either hardware, a combination of hardware and software, software, or software in execution. For example, a component may be, but is not limited to being, a process running on a processor, a processor, an object, an executable, a thread of execution, a program, and/or a computer. By way of illustration, both an application running on a server and the server can be a component. One or more components may reside within a process and/or thread of execution and a component may be localized on one computer and/or distributed between two or more computers.

[0120] It is understood that the examples and embodiments described herein are for illustrative purposes only and that various modifications or changes in light thereof will be suggested to persons skilled in the art and are to be included within the spirit and purview of this application and scope of the appended claims. All publications, patents, and patent applications cited herein are hereby incorporated by reference in their entirety for all purposes.

### II. Compositions & Kits

[0121] In an aspect is provided a probe panel including a plurality of oligonucleotide probes as described herein (e.g., a sequence at least 80% homologous to SEQ ID NO:1 to SEQ ID NO:10530). In embodiments, each oligonucleotide probe includes a first hybridization sequence designed to specifically bind to a first target sequence of an RNA molecule and a second hybridization sequence designed to specifically bind to a second target sequence of the RNA molecule, wherein the probe panel is configured to detect at least 25 RNA molecules associated with IBD. For example, the probe panel may be configured to detect at least 25 RNA molecules selected from the group consisting of TNF, IL1B, IL6, IL17A, IL10, IL10RA, IL23R, IFNG, CXCL9, CXCL10, CXCL11, CXCR3, CCR7, CD3E, CD4, CD8A, FOXP3, CD68, MS4A1, ICOSLG, MUC2, CLDN1, EPCAM, CEACAM5, KRT20, COL1A1, TGFB1, and VCAM1. In embodiments, the probe panel is configured to detect a sequence selected from the group consisting of ACKR1, ACKR4, ACSS3, ACTA2, ADIPOQ, ANGPT2, ANKRD29, ANO1, ANXA1, ANXA13, APC, AQP1, AQP3, BEST2, BEST4, BRAF, CA2, CA7, CAMK2N1, CAVIN2, CCK, CCL2, CCL20, CCL3, CCL4, CCL5, CCR2, CCR5, CCR7, CD14, CD163, CD19, CD1C, CD2, CD247, CD27, CD274, CD276, CD28, CD33, CD34, CD36, CD38, CD3D, CD3E, CD4, CD40, CD40LG, CD44, CD47, CD68, CD70, CD74, CD79A, CD80, CD86, CD8A, CDC25C, CDH1, CDH19, CDX2, CEACAM1, CEACAM5, CEACAM8, CENPK, CHGA, CHRM2, CKB, CLCA1, CLCA4, CLDN1, CLDN3, CLDN4, CLEC9A, CLU, CNTNAP2, COL1A1, CPB1, CSF1R, CSPG4, CTLA4, CTNNA2, CTNNB1, CTSS, CX3CL1, CX3CR1, CXCL10, CXCL11, CXCL13, CXCL9, CXCR3, CXCR4, CXCR5, CXCR6, CYP1A1, CYP2A6, DDIT4, DEFA5, DES, DGKG, DPT, DSP, EGFR, ELF3, EOMES, EPCAM, EPHB3, ERBB2, ESM1, FABP1, FAM210B, FAP, FAS, FASN, FBLN1, FBN1, FCAR, FCGR1A, FCGR3A, FGB, FGFR4, FN1, FOXP3, FSCN1, FZD7, GATA3, GA™, GIP, GNLY, GPC1, GPR183, GPRC5A, GPX2, GREM1, GREM2, GRHL1, GUCA2A, GZMA, GZMB, GZMH, GZMK, HAVCR2, HLA-A, HLA-DRA, HNF4A, HOXD8, ICOSLG, ID2, IDO1, IER3, IFNG, IGFBP7, IGHA1, IGHD, IGHG1, IGHM, IL10, IL10RA, IL17A, IL18R1, IL1B, IL2RA, IL2RB, IL6, IL7R, INS, IRF1, ITGAM, ITGAX, ITGB2, ITLN1, JAK3, JCHAIN, KDR, KIT, KLF1, KLRB1, KLRD1, KLRF1, KLRK1, KRAS, KRT20, LAG3, LAMC3, LARS1, LGR5, LPL, LTBP2, LUM, LYVE1, LYZ, MADCAM1, MAPK1, MET, MKI67, MLN, MMP1, MMRN1, MMRN2, MRC1, MS4A1, MUC1, MUC12, MUC2, MUC5B, MUC6, MYC, MYH11, NCAM1, NCR1, NEUROD1, NEUROG3, NKG7, NONO, NOVA1, NRXN1, NTS, ODC1, OLFM4, PAX2, PDCD1, PDCD1LG2, PDE4A, PDGFRA, PDGFRB, PDK4, PECAMI, PHGR1, PIM1, PLAT, PLIN1, PLXND1, POLD2, POLR2A, PON2, POSTN, POU2AF1, POU2F3, PPARG, PRDM1, PRF1, PROM1, PROX1, PTGS2, PYGB, PYY, RARRES1, RBP2, REG1A, REG4, RGMB, RGS5, ROBO1, ROBO2, RRM2, RSPO3, RUNX1, S100A9, S100P, SCGN, SDC1, SELE, SELL, SETD5, SH2D6, SKA3, SLC16A1, SLC2A1, SLC3A2, SLC6A19, SLC7A5, SMOC2, SNCA, SNCG, SOX10, SPINK4, SST, ST14, STAT1, STAT3, STAT4, STC1, SYTL2, TAGLN, TAP1, TAP2, TBX21, TCF7, TCL1A, TFF3, TFP1, TGFB1, THBS1, THY1, TICRR, TIGIT, TLR2, TLR4, TLR9, TNF, TNFRSF17, TNFRSF4, TNFRSF9, TNFSF13B, TNFSF9, TOP2A, TP53, TPH1, TSPAN8, VCAM1, VCAN, VEGFA, VIM, VWF, WARS1, WNT2B, WNT5B, and ZNF800. In embodiments, each RNA molecule is detected by at least three oligonucleotide probes targeting distinct sequences of the RNA molecule.

[0122] In embodiments, the first and second hybridization sequences overlap by no more than 8 base pairs with each other. In embodiments, each probe sequence includes a sequence overlap of less than eight nucleotides between the first segment and the second segment of the same probe sequence. The first and second segments correspond to the two hybridization arms of a circularizable oligonucleotide probe. Limiting the overlap between these segments ensures that each segment binds to a distinct region of the target sequence, thereby preserving the specificity of hybridization. Overlap of greater than or equal to eight nucleotides may result in undesirable intra-molecular interactions, such as the formation of secondary structures or partial self-annealing, which may interfere with the hybridization, ligation, or amplification steps of the assay. The restriction on segment overlap reduces the likelihood of internal complementarity that could compromise probe performance, and facilitates the design of structurally stable probes suitable for multiplexed applications. In embodiments, the overlap constraint is applied during the computational design process and serves as an exclusion criterion when selecting candidate probes. The constraint supports the generation of probe sequences that retain structural distinction between their hybridization arms and minimizes sequence redundancy within each probe. In embodiments, the method includes removing any probe sequence that overlaps with another probe sequence in the second subset.

[0123] In an aspect is provided a solid support including a plurality of discrete tissue samples obtained from a patient having or suspected of having inflammatory bowel disease (IBD), wherein each tissue sample is selected from colon tissue, rectal tissue, ileal tissue, small intestine tissue, gastric tissue, esophageal tissue, perianal tissue, fibrotic tissue, or granulomatous tissue;

[0124] “\*MERGEFORMAT\* MERGEFORMAT wherein each tissue sample includes: (i) an RNA molecule hybridized to an oligonucleotide probe (e.g., a circularizable or circularized probe as described herein), the RNA molecule including a sequence of an IBD-associated gene; and (ii) a protein bound to a specific binding reagent, the protein being an IBD-associated protein. In embodiments, the IBD-associated gene is selected from TNF, IL1B, IL6, IL17A, CXCL9, CXCL10, or CXCL11. In embodiments, the IBD-associated protein is selected from CD68, FOXP3, CD4, CD8, or PD-1. In embodiments, the specific binding reagent includes an antibody covalently attached to a DNA oligonucleotide. In embodiments, the RNA molecule and the protein are co-localized within a segmented single cell of the tissue. In embodiments, the plurality of discrete tissue samples include both inflamed and non-inflamed mucosa from the same patient. In embodiments, the tissue is human tissue.

[0125] In embodiments, the RNA molecule includes a sequence of a gene selected from the group consisting of TNF, IL1B, IL6, IL17A, IFNG, IL23R, IL10, IL10RA, FOXP3, CXCL9, CXCL10, CXCL11, CXCR3, CCR7, MUC2, CLDN1, EPCAM, CEACAM5, KRT20, COL1A1, TGFB1, and VCAM1. In embodiments, the protein is selected from the group consisting of CD3E, CD4, CD8A, FOXP3, CD68, ITGAX, ITGAM, MS4A1, EPCAM, MUC2, PDCD1, and VCAM1.

[0126] In an aspect, provided herein are kits for use in accordance with any of the compounds, compositions, or methods disclosed herein, and including one or more elements thereof. In embodiments, a kit includes labeled nucleotides including differently labeled nucleotides, enzymes, buffers, oligonucleotides, and related solvents and solutions. In embodiments, the kit includes one or more oligonucleotide probes (e.g., an oligonucleotide probe as described herein). The kit may also include a template nucleic acid (DNA and/or RNA), one or more primer polynucleotides, nucleoside triphosphates (including, e.g., deoxyribonucleotides, dideoxynucleotides, ribonucleotides, labeled nucleotides, and/or modified nucleotides), buffers, salts, and/or labels (e.g., fluorophores). In embodiments, the kit includes components useful for circularizing template polynucleotides using a ligation enzyme (e.g., Circligase enzyme, Taq DNA Ligase, HiFi Taq DNA Ligase, T4 ligase, SplintR ligase, or Ampligase DNA Ligase). For example, such a kit further includes the following components: (a) reaction buffer for controlling pH and providing an optimized salt composition for a ligation enzyme (e.g., Circligase enzyme, Taq DNA Ligase, HiFi Taq DNA Ligase, T4 ligase, SplintR ligase, or Ampligase DNA Ligase), and (b) ligation enzyme cofactors. In embodiments, the kit further includes instructions for use thereof. In embodiments, kits described herein include a polymerase. In embodiments, the polymerase is a DNA polymerase. In embodiments, the DNA polymerase is a thermophilic nucleic acid polymerase. In embodiments, the DNA polymerase is a modified archaeal DNA polymerase. In embodiments, the kit includes a sequencing solution. In embodiments, the sequencing solution includes labeled nucleotides including differently labeled nucleotides, wherein the label (or lack thereof) identifies the type of nucleotide. For example, each adenine nucleotide, or analog thereof; a thymine nucleotide; a cytosine nucleotide, or analog thereof; and a guanine nucleotide, or analog thereof may be labeled with a different fluorescent label.

[0127] In an aspect is provided a plurality of oligonucleotide probes. In embodiments, the oligonucleotide probes are designed to specifically bind to a sequence of a nucleic acid molecule (e.g., an mRNA molecule). In embodiments, the oligonucleotide probe is designed to bind to a sequence of a nucleic acid molecule including a gene. In embodiments, the gene is ACKR1, ACKR4, ACSS3, ACTA2, ADIPOQ, ANGPT2, ANKRD29, ANO1, ANXA1, ANXA13, APC, AQP1, AQP3, BEST2, BEST4, BRAF, CA2, CA7, CAMK2N1, CAVIN2, CCK, CCL2, CCL20, CCL3, CCL4, CCL5, CCR2, CCR5, CCR7, CD14, CD163, CD19, CD1C, CD2, CD247, CD27, CD274, CD276, CD28, CD33, CD34, CD36, CD38, CD3D, CD3E, CD4, CD40, CD40LG, CD44, CD47, CD68, CD70, CD74, CD79A, CD80, CD86, CD8A, CDC25C, CDH1, CDH19, CDX2, CEACAM1, CEACAM5, CEACAM8, CENPK, CHGA, CHRM2, CKB, CLCA1, CLCA4, CLDN1, CLDN3, CLDN4, CLEC9A, CLU, CNTNAP2, COL1A1, CPB1, CSF1R, CSPG4, CTLA4, CTNNA2, CTNNB1, CTSS, CX3CL1, CX3CR1, CXCL10, CXCL11, CXCL13, CXCL9, CXCR3, CXCR4, CXCR5, CXCR6, CYP1A1, CYP2A6, DDIT4, DEFA5, DES, DGKG, DPT, DSP, EGFR, ELF3, EOMES, EPCAM, EPHB3, ERBB2, ESM1, FABP1, FAM210B, FAP, FAS, FASN, FBLN1, FBN1, FCAR, FCGR1A, FCGR3A, FGB, FGFR4, FN1, FOXP3, FSCN1, FZD7, GATA3, GA™, GIP, GNLY, GPC1, GPR183, GPRC5A, GPX2, GREM1, GREM2, GRHL1, GUCA2A, GZMA, GZMB, GZMH, GZMK, HAVCR2, HLA-A, HLA-DRA, HNF4A, HOXD8, ICOSLG, ID2, IDO1, IER3, IFNG, IGFBP7, IGHA1, IGHD, IGHG1, IGHM, IL10, IL10RA, IL17A, IL18R1, IL1B, IL2RA, IL2RB, IL6, IL7R, INS, IRF1, ITGAM, ITGAX, ITGB2, ITLN1, JAK3, JCHAIN, KDR, KIT, KLF1, KLRB1, KLRD1, KLRF1, KLRK1, KRAS, KRT20, LAG3, LAMC3, LARS1, LGR5, LPL, LTBP2, LUM, LYVE1, LYZ, MADCAM1, MAPK1, MET, MKI67, MLN, MMP1, MMRN1, MMRN2, MRC1, MS4A1, MUC1, MUC12, MUC2, MUC5B, MUC6, MYC, MYH11, NCAM1, NCR1, NEUROD1, NEUROG3, NKG7, NONO, NOVA1, NRXN1, NTS, ODC1, OLFM4, PAX2, PDCD1, PDCD1LG2, PDE4A, PDGFRA, PDGFRB, PDK4, PECAMI, PHGR1, PIM1, PLAT, PLIN1, PLXND1, POLD2, POLR2A, PON2, POSTN, POU2AF1, POU2F3, PPARG, PRDM1, PRF1, PROM1, PROX1, PTGS2, PYGB, PYY, RARRES1, RBP2, REG1A, REG4, RGMB, RGS5, ROBO1, ROBO2, RRM2, RSPO3, RUNX1, S100A9, S100P, SCGN, SDC1, SELE, SELL, SETD5, SH2D6, SKA3, SLC16A1, SLC2A1, SLC3A2, SLC6A19, SLC7A5, SMOC2, SNCA, SNCG, SOX10, SPINK4, SST, ST14, STAT1, STAT3, STAT4, STC1, SYTL2, TAGLN, TAP1, TAP2, TBX21, TCF7, TCL1A, TFF3, TFP1, TGFB1, THBS1, THY1, TICRR, TIGIT, TLR2, TLR4, TLR9, TNF, TNFRSF17, TNFRSF4, TNFRSF9, TNFSF13B, TNFSF9, TOP2A, TP53, TPH1, TSPAN8, VCAM1, VCAN, VEGFA, VIM, VWF, WARS1, WNT2B, WNT5B, or ZNF800. In embodiments, the oligonucleotide probe includes a sequence selected from SEQ ID NO:7021 to SEQ ID NO:10530.

[0128] In an aspect is provided an oligonucleotide probe including a sequence at least 80% homologous to SEQ ID NO:1 to SEQ ID NO:10530. In embodiments, the oligonucleotide probe includes a sequence 90% homologous to SEQ ID NO:1 to SEQ ID NO:10530. In embodiments, the oligonucleotide probe includes a sequence selected from SEQ ID NO:1 to SEQ ID NO:10530. In embodiments, the oligonucleotide probe includes a sequence selected from SEQ ID NO:7021 to SEQ ID NO:10530. In embodiments, the oligonucleotide probe includes a first sequence selected from SEQ ID NO:1 to SEQ ID NO:3510 and a second sequence selected from SEQ ID NO:3511 to SEQ ID NO:7020. In embodiments, the oligonucleotide probe includes a primer binding sequence, or complement thereof, selected from the following: SEQ ID NO:10531, SEQ ID NO:10532, SEQ ID NO:10533, SEQ ID NO:10534, SEQ ID NO:10535, SEQ ID NO:10536, SEQ ID NO:10537, SEQ ID NO:10538, SEQ ID NO:10539, SEQ ID NO:10540, SEQ ID NO:10541, SEQ ID NO:10542, SEQ ID NO:10543, or SEQ ID NO:10544.

[0129] In an aspect is provided a plurality of oligonucleotide probes, wherein each oligonucleotide probe includes a first end, a backbone sequence, and a second end, wherein the first end includes a sequence selected from SEQ ID NO:1 to SEQ ID NO:3510 and the second end includes a sequence selected from SEQ ID NO:3511 to SEQ ID NO:7020. In embodiments, the oligonucleotide probe is in a cell or tissue. In embodiments, the cell or tissue further includes a concatemer including multiple complementary copies of the oligonucleotide probe. In embodiments, the cell or tissue is immobilized to a solid support.

[0130] A probe is a molecule designed to recognize (and bind or hybridize to) another molecule, e.g., a target analyte, another probe molecule, etc. As used herein, the term “probe” may refer either to a chemical/physical probe molecule (e.g., a nucleic acid probe molecule) or to its representation in a computer-readable, digital format (e.g., as a string of characters representing the sequence of bases in a nucleic acid probe molecule). In embodiments, the oligonucleotide probe is a linear nucleic acid molecule. Exemplary probes or probe sets may be based on a padlock probe, a gapped padlock probe, a SNAIL (Splint Nucleotide Assisted Intramolecular Ligation) probe set, a PLAYR (Proximity Ligation Assay for RNA) probe set, a PLISH (Proximity Ligation in situ Hybridization) probe set, and RNA-templated ligation probes (e.g., including 1 to 4 ribonucleotides near the ligation junction). The specific probe or probe set design can vary. In some embodiments, the probes, such as a padlock probe or a probe set that comprises a padlock probe, contain one or more barcodes in the backbone sequence. In some embodiments, one or more barcodes are indicative of a sequence in the analyte nucleic acid, such as a single nucleotide (e.g., SNPs or point mutations), a dinucleotide sequence, a short sequence of about 5 nucleotides in length, or a sequence of any suitable length.

[0131] In embodiments, the oligonucleotide probe is about 50 to about 500 nucleotides in length. In embodiments, the oligonucleotide probe is about 50 to about 300 nucleotides in length. In embodiments, the oligonucleotide probe is about 80 to about 300 nucleotides in length. In embodiments, the oligonucleotide probe is about 50 to about 150 nucleotides in length. In embodiments, the oligonucleotide probe is about or more than about 40, 50, 75, 100, 125, 150, 175, 200, 250, 300, 350, 400, or 500 nucleotides in length. In embodiments, the oligonucleotide probe is less than about 50, 75, 100, 125, 150, 175, 200, 250, 300, 350, 400, or 500 nucleotides in length. In embodiments, each probe oligonucleotide (e.g., each probe oligonucleotide of a plurality of probe oligonucleotides) includes a primer binding sequence (i.e., a sequence complementary to a primer, such as an amplification or sequencing primer). In embodiments, the oligonucleotide probe is about 80 to about 90 nucleotides in length. In embodiments, the oligonucleotide probe is 80 to 100 nucleotides in length. In embodiments, the oligonucleotide probe is 80, 81, 82, 83, 84, 85, 86, 87, 88, 89, or 90 nucleotides. In embodiments, the oligonucleotide probe is 80 nucleotides. In embodiments, the oligonucleotide probe is 81 nucleotides. In embodiments, the oligonucleotide probe is 82 nucleotides. In embodiments, the oligonucleotide probe is 83 nucleotides. In embodiments, the oligonucleotide probe is 84 nucleotides. In embodiments, the oligonucleotide probe is 85 nucleotides. In embodiments, the oligonucleotide probe is 86 nucleotides. In embodiments, the oligonucleotide probe is 87 nucleotides. In embodiments, the oligonucleotide probe is 88 nucleotides. In embodiments, the oligonucleotide probe is 89 nucleotides. In embodiments, the oligonucleotide probe is 90 nucleotides.

[0132] In embodiments, the oligonucleotide probe includes a target hybridization sequence (i.e., a sequence complementary to a sequence of the target nucleic acid molecule). In embodiments, the target hybridization sequence includes 5 to 25 nucleotides. In embodiments, the target hybridization sequence is about 5 to about 35 nucleotides in length. In embodiments, the target hybridization sequence is about 12 to 15 nucleotides in length. In embodiments, the target hybridization sequence is about 15 to 30 nucleotides in length. In embodiments, the target hybridization sequence (e.g., the first and/or second target hybridization sequence) is greater than 30 nucleotides. In embodiments, the target hybridization sequence is about 5 to about 35 nucleotides in length. In embodiments, the target hybridization sequence is about 12 to 15 nucleotides in length. In embodiments, the target hybridization sequence is about 35 to 40 nucleotides in length to maximize specificity. In embodiments, the target hybridization sequence is greater than 12 nucleotides in length. In embodiments, the target hybridization sequence is 15 nucleotides in length. In embodiments, the target hybridization sequence is 20 nucleotides in length. In embodiments, the target hybridization sequence is 25 nucleotides in length. In embodiments, the target hybridization sequence is about 5, about 10, about 15, about 20, about 25, about 30, or about 35 nucleotides in length. In embodiments, the target hybridization sequence is about 5, 6, 7, 8, 9, 10, 11, 12, 13, 14, 15, 16, 17, 18, 19, 20, 21, 22, 23, 24, 25, 26, 27, 28, 29, 30, 31, 32, 33, 34, 35, 36, 37, 38, 39, 40, 41, 42, 43, 44, 45, 46, 47, 48, 49, or 50 nucleotides in length. In embodiments, the target hybridization sequence of each oligonucleotide primer is a single stranded polynucleotide that is at least 50% complementary, at least 75% complementary, at least 85% complementary, at least 90% complementary, at least 95% complementary, at least 98%, at least 99% complementary, or 100% complementary to a portion of a target polynucleotide. In embodiments, the target hybridization sequence includes about 45% to 65% GC content (i.e., the percentage of nucleobases that are either guanine or cytosine). In embodiments, the target hybridization sequence does not include 4 or more guanine or cytosine nucleobases. In embodiments, the target hybridization sequence is designed according to the methods and systems described herein.

[0133] In embodiments, the oligonucleotide does not include five consecutive weak bases. In embodiments, the oligonucleotide does not include five consecutive strong bases. In embodiments, the oligonucleotide does not include secondary structure. In embodiments, the oligonucleotide does not include 2, 3, 4, 5, 6, 7, 8, 9, or 10 consecutive weak bases. In embodiments, the oligonucleotide does not include 2, 3, 4, 5, 6, 7, 8, 9, or 10 consecutive strong bases. In embodiments, the oligonucleotide does not include 2, 3, 4, 5, 6, 7, 8, 9, or 10 consecutive weak bases or 2, 3, 4, 5, 6, 7, 8, 9, or 10 consecutive strong bases. In embodiments, the oligonucleotide does not include 2, 3, 4, 5, 6, 7, 8, 9, or 10 consecutive weak bases and does not include 2, 3, 4, 5, 6, 7, 8, 9, or 10 consecutive strong bases.

[0134] In embodiments, the plurality of probes is ordered into subsets. In embodiments, the probes in a probe subset have a similar melting temperature for binding to their target sites. For example, the Tm may range from about 45° C. to about 65° C., including any Tm within this range such as 45° C., 46° C., 47° C., 48° C., 49° C., 50° C., 51° C., 52° C., 53° C., 54° C., 55° C., 56° C., 57° C., 58° C., 59° C., 60° C., 61° C., 62° C., 63° C., 64° C., or 65° C. In embodiments, the subset of oligonucleotide probes is grouped according to their sequencing primer sequence. For example, a first subset includes the sequencing primer sequence SEQ ID NO:10537 and the subset includes 663 oligonucleotide probes. The second subset includes the sequencing primer sequence SEQ ID NO:10538 and the subset includes 531 oligonucleotide probes. In embodiments, the plurality is divided into 7 subsets and grouped according to a sequencing primer sequence In embodiments, the probes of the first set are capable of binding between 75 and 150 different gene sequences. In embodiments, the probes are capable of binding between 25 and 75 different gene sequences. In embodiments, the probes are capable of binding between 30 and 100 different gene sequences. In embodiments, the probes are capable of binding between 40 and 120 different gene sequences. In embodiments, the probes are capable of binding between 50 and 150 different gene sequences. In embodiments, the probes are capable of binding between 60 and 180 different gene sequences. In embodiments, the probes are capable of binding between 70 and 200 different gene sequences. In embodiments, the probes are capable of binding between 80 and 220 different gene sequences. In embodiments, the probes are capable of binding between 90 and 250 different gene sequences. In embodiments, the probes are capable of binding between 100 and 300 different gene sequences. In embodiments, the probes are capable of binding between 150 and 400 different gene sequences.

[0135] In embodiments, the first probe set includes a plurality of oligonucleotide probes, wherein a first subset of the plurality of oligonucleotide probes includes a first sequencing primer binding sequence. A second subset includes a plurality of oligonucleotide probes, wherein each of the oligonucleotide probes includes the second sequencing primer binding sequence. A third subset includes a plurality of oligonucleotide probes, wherein each of the oligonucleotide probes includes the third sequencing primer binding sequence. A fourth subset includes a plurality of oligonucleotide probes, wherein each of the oligonucleotide probes includes the fourth sequencing primer binding sequence. A fifth subset includes a plurality of oligonucleotide probes, wherein each of the oligonucleotide probes includes the fifth sequencing primer binding sequence. A sixth subset includes a plurality of oligonucleotide probes, wherein each of the oligonucleotide probes includes the sixth sequencing primer binding sequence. A seventh subset includes a plurality of oligonucleotide probes, wherein each of the oligonucleotide probes includes the seventh sequencing primer binding sequence. An eighth subset includes a plurality of oligonucleotide probes, wherein each of the oligonucleotide probes includes the eighth sequencing primer binding sequence. A ninth subset includes a plurality of oligonucleotide probes, wherein each of the oligonucleotide probes includes the ninth sequencing primer binding sequence. A tenth subset includes a plurality of oligonucleotide probes, wherein each of the oligonucleotide probes includes the tenth sequencing primer binding sequence. An eleventh subset includes a plurality of oligonucleotide probes, wherein each of the oligonucleotide probes includes the eleventh sequencing primer binding sequence. A twelfth subset includes a plurality of oligonucleotide probes, wherein each of the oligonucleotide probes includes the twelfth sequencing primer binding sequence.

[0136] The probe sequences described herein may be screened to avoid common six-base-cutter restriction enzyme recognition sites to aid in the ease of manipulation for conventional molecular cloning techniques. Selected sequences are additionally subjected to predicted secondary structure analysis, and those with the least secondary structure are chosen for further evaluation. Any program known in the art can be used to predict secondary structure, such as the MFOLD program (Zuker, 2003, Nucleic Acids Res. 31 (13):3406-15; Mathews et al., 1999, J. Mol. Biol. 288:911-940).

[0137] In embodiments, the probe oligonucleotide includes one or more modifications, for example the oligonucleotide may include nucleotides modified at the base moiety, sugar moiety or phosphate backbone to improve, e.g., the stability, hybridization, or solubility of the molecule. For example, the deoxyribose phosphate backbone of the nucleic acids can be modified to generate peptide nucleic acids (see Hyrup et al., 1996, Bioorganic & Medicinal Chemistry 4(1):5-23). As used herein, the terms “peptide nucleic acids” (PNAs) refer to nucleic acid mimics, e.g., DNA mimics, in which the deoxyribose phosphate backbone is replaced by a pseudopeptide backbone and only the four natural nucleobases are retained. The neutral backbone of PNAs has been shown to allow for specific hybridization to DNA and RNA under conditions of low ionic strength.

### III. Methods

[0138] In an aspect is provided a method of detecting, diagnosing, and/or treating Inflammatory Bowel Disease (IBD). When studying IBD, particularly conditions like ulcerative colitis (UC) and Crohn's disease, several tissue types are critical for comprehensive analysis. Colon tissue, including both inflamed and non-inflamed mucosa, is essential for understanding disease activity and treatment effectiveness, while normal adjacent tissue allows for comparisons that reveal the extent of inflammation and damage. Rectal tissue is particularly relevant in UC, as inflammation often begins in the rectum and progresses proximally. Ileal tissue is important in Crohn's disease, especially when the disease affects the terminal ileum, and small intestine tissue is also valuable for studying Crohn's disease, which can involve any part of the gastrointestinal (GI) tract. Lymphoid tissues, such as Peyer's patches in the small intestine and mesenteric lymph nodes, are crucial for exploring the immune system's role in IBD. Gastric tissue can be relevant in Crohn's disease cases where inflammation extends to the stomach, while esophageal tissue, although rarely involved, is pertinent when Crohn's disease affects the esophagus. Perianal tissue is particularly useful in studying perianal Crohn's disease, which is associated with complications like abscesses and fistulas. Fibrotic tissue, commonly found in chronic IBD cases, is essential for understanding complications such as strictures, while granulomatous tissue, specific to Crohn's disease, serves as a hallmark for differentiating it from UC. Additionally, neoplastic tissue, including dysplasia or cancer, is important for studying the increased risk of colorectal cancer in long-standing IBD. Biopsies from fistulas provide insight into disease severity and progression in Crohn's disease, and surgical resection samples offer a comprehensive view of disease extent, severity, and response to therapy.

[0139] In an aspect is provided a method of detecting a biomolecule in or on a cell or tissue. In embodiments, the method includes immobilizing a cell or tissue including a biomolecule to a solid support; contacting the biomolecule in or on the cell or tissue with an oligonucleotide as described herein, binding a detection agent (e.g., a probe) including a label to the probe oligonucleotide (or an amplification product thereof); detecting the label, thereby detecting the biomolecule. For example, the method includes delivering antibody-oligonucleotide (Ab-oligo) conjugates (e.g., a specific binding agent described herein) and subsequent amplification probes, such as padlock probes (e.g., a polynucleotide probe described herein), bound to the oligonucleotide portion of the Ab-oligo). In embodiments, the method includes imaging the tissue section. In embodiments, the detection agent is a biomolecule-specific binding agent. In embodiments, the biomolecule-specific binding agent is a protein-specific binding agent. In embodiments, the biomolecule-specific binding agent is an oligonucleotide-specific binding agent. In embodiments, the biomolecule-specific binding agent is capable of binding to a cluster of differentiation (CD) marker, integrin, selectin, cadherin, cytokine receptor, chemokine receptor, Toll-like receptor (TLR), ion channel, transmembrane protein, lipoprotein, glycoprotein, cell surface protein, transport protein, intracellular organelle, or transcription factor. In embodiments, the intracellular organelle includes actin, carbohydrate, centrosomes and centrioles, chloroplasts (in plant cells and some protists), cytoskeleton, endoplasmic reticulum, endosome, Golgi apparatus, intermediate filaments, lysosome, microfilaments, microtubules, mitochondria, nuclear envelope, nuclear pores, nucleoid, nucleolus, nucleus, peroxisome, phosphatidylserine, plasma membrane, ribosomes, rough endoplasmic reticulum, smooth endoplasmic reticulum, transferrin receptor, transport vesicles, and/or vacuoles. In embodiments, the biomolecule specific binding agent is capable of binding to a biomolecule in the mitogen-activated protein kinase (MAPK) pathway, PI3K/AKT/mTOR pathway, Wnt/β-catenin pathway, intrinsic (mitochondrial) pathway, extrinsic (death receptor) pathway, caspase cascade, Notch signaling pathway, hedgehog signaling pathway, TGF-β (transforming growth factor Beta) pathway, JAK/STAT pathway, G-protein coupled receptor (GPCR) pathway, calcium signaling pathway, glycolysis, citric acid cycle (Krebs Cycle), oxidative phosphorylation, lipid metabolism pathway, amino acid metabolism, Toll-like receptor (TLR) pathway, NF-κB signaling pathway, complement pathway, nucleotide excision repair (NER), base excision repair (BER), mismatch repair (MMR), cyclin-dependent kinase (CDK) pathway, Rb (retinoblastoma) pathway, p53 pathway, unfolded protein response (UPR), heat shock response pathway, oxidative stress pathway, BMP (bone morphogenetic protein) pathway, FGF (fibroblast growth factor) pathway, Sonic Hedgehog pathway, neurotrophin signaling pathway, synaptic transmission pathway, axon guidance pathways, insulin signaling pathway, thyroid hormone pathway, steroid hormone pathway, VEGF (vascular endothelial growth factor) pathway, DNA methylation pathway, histone modification pathway, or angiogenesis. In embodiments, the biomolecule specific binding agent is capable of binding to a biomolecule on the surface of or in a B cell, Mature B Cell, Follicular B cell, Marginal Zone B cell, Short lived plasma cell, Memory B cell, Long lived plasma cell, B1 cell, Breg, Germinal Center B cell, Macrophage, Monocyte, M1 macrophage, M2 macrophage, Dendritic Cell, Plasmacytoid dendritic cell, Monocyte-derived dendritic cell, T cell, T Follicular Helper, Th1, Th2, Th9, Th17, Th22, Treg, platelet (activated), platelet (rested), natural killer cell, neutrophil, basophil, eosinophil, mast cell, astrocyte, neuron, glial cell, lymphocyte, myeloid cell, granulocytes, neural cells, stem cells, endothelial cells, epithelial cells, mesenchymal stem cell, hematopoietic stem cell, embryonic stem, stromal cell, erythrocyte, fibroblast, or apoptotic cell.

[0140] In embodiments, the detection agent is an oligonucleotide-specific binding agent capable of hybridizing to a target oligonucleotide sequence in a tissue section. In embodiments, the detection agent is an oligonucleotide. In embodiments, the detection agent is an oligonucleotide, wherein the oligonucleotide includes: a) a first region at a 3′ end that is hybridized to a first complementary region of the polynucleotide, and b) a second region at a 5′ end that is hybridized to a second complementary region of the polynucleotide, wherein the second complementary region is 5′ with respect to the first complementary region. In embodiments, the method includes i) circularizing the oligonucleotide agent to generate a circular oligonucleotide and ligating the oligonucleotide-specific binding agent; ii) amplifying the circular oligonucleotide by extending an amplification primer hybridized to the circular oligonucleotide with a strand-displacing polymerase, wherein the amplification primer extension generates an extension product including multiple complements of the circular oligonucleotide; and iii) sequencing the extension product of step (ii). In embodiments, circularizing the oligonucleotide-specific binding agent includes extending the 3′ end of the oligonucleotide-specific binding agent (using a polymerase to incorporate one or more nucleotides) along the target nucleic acid to generate a complementary sequence and ligating the extended 3′ end of the oligonucleotide-specific binding agent to the 5′ end of the oligonucleotide-specific binding agent. In embodiments, the circular oligonucleotide includes a barcode sequence. In embodiments, circularizing in step i) further includes extending the 3′ end of the oligonucleotide primer (e.g., extending the 3′ end of the primer using a polymerase (e.g., a Thermus thermophilus (Tth) DNA polymerase) to incorporate one or more nucleotides) along the target nucleic acid to generate a complementary sequence (e.g., complementary to the target nucleic acid, for example a target RNA sequence) prior to ligating the complementary sequence to the 5′ end of the oligonucleotide primer. In embodiments, the oligonucleotide is an oligonucleotide primer.

[0141] In an aspect is provided a method of detecting nucleic acid molecules in a tissue sample from a patient having or suspected of having inflammatory bowel disease (IBD), the method including: i) contacting the tissue sample with a first polynucleotide probe and binding the first polynucleotide probe to a first nucleic acid molecule, and contacting the sample with a second polynucleotide probe and binding the second polynucleotide probe to a second nucleic acid molecule, wherein the first polynucleotide probe includes a first oligonucleotide binding sequence and a first sequence, and wherein the second polynucleotide probe includes a second oligonucleotide binding sequence and a second sequence; ii) amplifying the first and second polynucleotide probes to generate amplification products; iii) hybridizing a first oligonucleotide to the first hybridization sequence and detecting a series of fluorescent signals associated with the first sequence to determine the first nucleic acid molecule and a location of the first nucleic acid molecule, followed by hybridizing a second oligonucleotide to the second oligonucleotide binding sequence, and detecting a series of fluorescent signals associated with the second sequence to determine the second nucleic acid molecule and a location of the second nucleic acid molecule, wherein the first oligonucleotide and the second oligonucleotide include different sequences; and iv) generating an image of the tissue sample including indicia data corresponding to the locations of the first and second nucleic acid molecules.

[0142] In embodiments, the method includes identifying the patient as having inflammatory bowel disease (IBD) when the generated image of the tissue includes a spatial pattern of gene expression associated with IBD. As used herein, a “spatial pattern” refers to the arrangement and distribution of detectable indicia (e.g., fluorescent spots, dots, or features) corresponding to nucleic acid molecules that have been identified and localized within the tissue section. The spatial pattern therefore reflects not only the identity of the transcript or protein detected but also its position relative to other transcripts, cell boundaries, tissue structures, and histological features. The indicia may be overlaid on a histological image of the tissue, such as a fluorescent H&E (fH&E) image, to produce a composite representation in which each gene or protein target is visualized as a dot or feature at its physical location in the sample. For example, dots representing TNF transcripts may appear clustered within inflamed crypt regions of colonic mucosa, whereas IFNG transcripts may be visualized within granulomatous lesions characteristic of Crohn's disease. Similarly, MUC2 expression may be observed along epithelial cell layers, with loss or reduction of signal in ulcerated regions, providing a spatially resolved molecular correlate of tissue pathology. Clusters of IL1B and IL6 transcripts within the lamina propria, or co-localization of FOXP3 and IL10 transcripts within regulatory T cells, may constitute spatial signatures of ulcerative colitis. In other embodiments, the spatial pattern is characterized by distribution relative to tissue landmarks, such as the presence of pro-inflammatory transcripts at the base of crypts, around ulcerated mucosal surfaces, or within mesenteric lymphoid aggregates. In embodiments, the spatial pattern includes ratios or relative distributions of pro- versus anti-inflammatory signals. For example, an increased ratio of TNF and IFNG transcripts to IL10 transcripts, reflected as relative densities of corresponding dots in the composite image, may indicate an active IBD lesion. In further embodiments, the spatial pattern comprises the neighbor relationships between transcripts and proteins, such as IL17A transcripts detected in CD4+ T cells positioned adjacent to epithelial cells, potentially suggesting barrier disruption. Accordingly, the spatial pattern of indicia overlaid on the tissue image provides a molecularly resolved visualization of IBD pathology. The detection of such patterns enables differentiation between ulcerative colitis and Crohn's disease, assessment of disease severity, and prediction of therapeutic response, based on composite images that integrate both morphology and spatially resolved gene expression.

[0143] In embodiments, the spatial pattern includes clustering (e.g., computationally grouping) of TNF, IL1B, and IL6 transcripts within colonic mucosa. In embodiments, the spatial pattern includes identifying granulomatous localization of IFNG, CXCL9, and CD68 transcripts within the tissue sample. In embodiments, the spatial pattern includes detection of IL17A transcripts within CD4+ T cells located at crypt borders of the tissue. In embodiments, the method includes identifying the patient as having inflammatory bowel disease (IBD) when the generated image of the tissue sample includes an elevated abundance of IBD-associated genes (e.g., relative to a control).

[0144] In an aspect is provided a method of detecting a nucleic acid molecule in a tissue, the method including: immobilizing a tissue to a solid support, wherein the tissue includes a nucleic acid molecule and is selected from colon tissue, rectal tissue, ileal tissue, small intestine tissue, gastric tissue, esophageal tissue, perianal tissue, fibrotic tissue, and granulomatous tissue; contacting the tissue sample with an oligonucleotide probe, wherein the oligonucleotide probe includes a first hybridization sequence and a second hybridization sequence; hybridizing the first hybridization sequence to the nucleic acid molecule and hybridizing the second hybridization sequence to the nucleic acid molecule; ligating the first hybridization sequence to the second hybridization sequence to form a circular polynucleotide; amplifying the circular polynucleotide to form an amplification product; and detecting (e.g., sequencing) a sequence of the amplification product. In embodiments, detecting includes sequencing.

[0145] In embodiments, prior to sequencing, the method includes amplifying the oligonucleotide probe. For example, following annealing the oligonucleotide probe to the nucleic acid molecule, the first sequence and the second sequence are ligated together to form a circular polynucleotide. The circular polynucleotide may then be amplified using rolling circle amplification (RCA) to form amplification produces including copies of the first sequence and the second sequence (and/or complements thereof) which may then be sequenced. In embodiments, amplification is performed at a temperature between or between about 20° C. and about 60° C. In embodiments, amplification is performed at a temperature between or between about 30° C. and about 40° C. In some embodiments, the amplification step, such as the rolling circle amplification (RCA) is performed at a temperature between at or about 25° C. and at or about 50° C., e.g., 25° C., 27° C., 29° C., 31° C., 33° C., 35° C., 37° C., 39° C., 41° C., 43° C., 45° C., 47° C., or 49° C. In embodiments, sequencing the sequence includes sequencing the first hybridization sequence, the second hybridization sequence, or a barcode sequence. In embodiments, the method includes detecting the nucleic acid molecule by identifying the first hybridization sequence, the second hybridization sequence, or both the first and second hybridization sequences. In embodiments, the method includes detecting the nucleic acid molecule by identifying the first hybridization sequence. In embodiments, the method includes detecting the nucleic acid molecule by identifying the second hybridization sequence. In embodiments, the method includes detecting the nucleic acid molecule by identifying both the first and second hybridization sequences.

[0146] In embodiments the probe oligonucleotides include a sequence provided herein, or a sequence with 80% or more homology with a sequence described herein. In embodiments, the probe oligonucleotide includes a sequence that is 85%, 90%, 95%, 96%, 97%, 98%, 99%, or 100% identical to a sequence described herein. In embodiments, the oligonucleotide probe further includes a barcode sequence. In embodiments, the oligonucleotide probe includes DNA. In embodiments, the oligonucleotide probe consists of DNA. In embodiments, the oligonucleotide probe is a single-stranded polynucleotide comprising at least one amplification primer binding sequence, at least one sequencing primer binding sequence, or both one amplification primer binding sequence and one sequencing primer binding sequence. In embodiments, the first hybridization sequence, the second hybridization sequence, or both the first and second hybridization sequences of the polynucleotide probe comprise one or more locked nucleic acid (LNA) nucleotides. In embodiments, an amplification primer and a sequencing primer are complementary to different primer binding sequences. In embodiments, the primer binding sequence is complementary to a fluorescent in situ hybridization (FISH) probe. FISH probes may be custom designed using known techniques in the art, see for example Gelali, E., Girelli, G., Matsumoto, M. et al. Nat Commun 10, 1636 (2019).

[0147] In embodiments, the methods of detection are performed in multiplex assays, whereby a plurality of target molecules are detected in the same assay (a single reaction mixture). In embodiments, the plurality of target molecules is detected simultaneously. In embodiments, the plurality of target molecules detected in the same assay is at least 5 different target molecules, at least 10 different target molecules, at least 20 different target molecules, at least 50 different target molecules, at least 75 different target molecules, at least 100 different target molecules, at least 200 different target molecules, at least 500 different target molecules, or at least 750 different target molecules, or at least 1000 different target molecules. In embodiments, the plurality of target molecules detected in the same assay is up to 50 different target molecules, up to 100 different target molecules, up to 150 different target molecules, up to 200 different target molecules, up to 300 different target molecules, up to 500 different target molecules, up to 750 different target molecules, up to 1000 different target molecules, up to 2000 different target molecules, or up to 5000 different target molecules. In embodiments, the plurality of target molecules detected is any range in between the foregoing numbers of different target molecules, such as, but not limited to, from 20 to 50 different target molecules, from 50 to 200 different target molecules, from 100 to 1000 different target molecules, or from 500 to 5000 different target molecules.

[0148] In embodiments, the method further includes detecting a target protein molecule. In embodiments, the method includes detecting the target protein molecule in a cell or tissue. In embodiments, the method includes binding a polynucleotide probe to an oligonucleotide, wherein the oligonucleotide is covalently bound to a specific binding agent (e.g., an antibody); detecting the polynucleotide probe, thereby detecting the target molecule. In embodiments, detecting includes serially contacting the oligonucleotides with labeled probes (e.g., labeled oligonucleotides or labeled nucleotides).

[0149] In embodiments, the polynucleotide probe includes a fluorescently labeled probe. The phrase “labeled probes” refers to mixture of nucleic acids that are detectably labeled, e.g., fluorescently labeled, such that the presence of the probe, as well as, any target sequence to which the probe is bound can be detected by assessing the presence of the label. In embodiments, the probes are about 30-300 bases in length, 40-300 bases in length, or 70-300 bases in length. In some embodiments, the probes are relatively uniform in length (e.g., an average length+/−10 bases). The probes may be uniformly labeled based on position of label and/or number of labels within the probe. In some embodiments, the probes are single-stranded. In some embodiments, the probes are double-stranded. Additional detection probes and related properties may be found in, e.g., U.S. Pat. Pub. US 2011/0039735, which is incorporated herein by reference in its entirety. In embodiments, the method includes binding a polynucleotide probe including a first binding sequence and a second binding sequence to an oligonucleotide, wherein the oligonucleotide is attached to the target molecule (e.g., covalently attached to an antibody, wherein the antibody is specifically bound to the target protein molecule); amplifying the polynucleotide probe to form an amplification product comprising one or more copies of the first binding sequence and the second binding sequence; hybridizing a primer to the amplification product and incorporating a labeled nucleotide into the primer, thereby detecting the target protein molecule. In embodiments, the method includes hybridizing a labeled probe to the amplification product and detecting the labeled probe, thereby detecting the target protein molecule.

[0150] In embodiments, the method includes detecting biomolecules in a tissue sample. The biological targets or molecules to be detected can be any biological molecules including but not limited to proteins, nucleic acids, lipids, carbohydrates, ions, or multicomponent complexes containing any of the above. Examples of subcellular targets include organelles, e.g., mitochondria, Golgi apparatus, endoplasmic reticulum, chloroplasts, endocytic vesicles, exocytic vesicles, vacuoles, lysosomes, etc. Exemplary nucleic acid targets can include genomic DNA of various conformations (e.g., A-DNA, B-DNA, Z-DNA), mitochondria DNA (mtDNA), mRNA, tRNA, rRNA, hRNA, miRNA, and piRNA. For example, following immobilization on the receiving substrate, the sections may be fixed with methanol, permeabilized with 0.025% Triton in PBS solution, and stained with primary antibodies directed against vimentin (fibroblasts) and macrophages, followed by secondary antibody labeling (e.g., Alexa-594 conjugated secondary antibodies). Additional counterstaining may be performed, for example using 4,6-diamidino-2-phenylindole (DAPI) mounting media to counterstain nuclei. In embodiments, the tissue sample includes colon tissue, rectal tissue, ileal tissue, small intestine tissue, Peyer's patches, mesenteric lymph nodes, gastric tissue, esophageal tissue, perianal tissue, fibrotic tissue, granulomatous tissue, and/or fistula tissue.

[0151] In embodiments, the tissue is a tissue section. In embodiments, the tissue section includes a tissue or a cell (e.g., plurality of cells such as blood cells). In embodiments, the tissue section includes one or more cells. In embodiments, the thickness of the tissue section is about 1 μm to about 20 μm. In embodiments, the thickness of the tissue section is about 5 μm to about 12 μm. In embodiments, the thickness of the tissue section is about 8 μm to about 15 μm. In embodiments, the thickness of the tissue section is about 1 μm, about 2 μm, about 3 μm, about 4 μm, about 5 μm, about 6 μm, about 7 μm, about 8 μm, about 9 μm, about 10 μm, about 11 μm, about 12 μm, about 13 μm, about 14 μm, or about 15 μm. In embodiments, the thickness of the tissue section is about 1 μm. In embodiments, the thickness of the tissue section is about 2 μm. In embodiments, the thickness of the tissue section is about 3 μm. In embodiments, the thickness of the tissue section is about 4 μm. In embodiments, the thickness of the tissue section is about 5 μm. In embodiments, the thickness of the tissue section is about 6 μm. In embodiments, the thickness of the tissue section is about 7 μm. In embodiments, the thickness of the tissue section is about 8 μm. In embodiments, the thickness of the tissue section is about 9 μm. In embodiments, the thickness of the tissue section is about 10 μm. In embodiments, the thickness of the tissue section is about 11 μm. In embodiments, the thickness of the tissue section is about 12 μm. In embodiments, the thickness of the tissue section is about 13 μm. In embodiments, the thickness of the tissue section is about 14 μm. In embodiments, the thickness of the tissue section is about 15 μm. In embodiments, the thickness of the tissue section is less than about 10 μm. In embodiments, the thickness of the tissue section is less about 6 μm, 7 μm, 8 μm, 9 μm or 10 μm. In embodiments, the cell or tissue is obtained via Laser capture microdissection (LCM). LCM is a method for isolating in micrometer-scale tissue or even single cells while retaining spatial information to link histology with molecular measurements. In LCM, a region of interest in the tissue section is isolated through laser cutting.

[0152] Tissue sections, e.g., tumor tissue samples, may be obtained surgically or using a laparoscope. A tissue section may be a tissue sample obtained from any part of the body to examine it for disease or injury, e.g., presence of cancer tissue or cells, or the extent or characteristics thereof. In particular embodiments, the tissue section includes abdominal tissue, bone, bone marrow, breast tissue, endometrial tissue, kidney tissue, liver tissue, lung or chest tissue, lymph node, nerve tissue, skin, testicular tissue, head or neck tissue, or thyroid tissue. In certain embodiments, the tissue is obtained from brain, breast, skin, bone, joint, skeletal muscle, smooth muscle, red bone marrow, thymus, lymphatic vessel, thoracic duct, spleen, lymph node, nasal cavity, pharynx, larynx, trachea, bronchus, lung, oral cavity, esophagus, liver, stomach, small intestine, large intestine, rectum, anus, spinal cord, nerve, pineal gland, pituitary gland, thyroid gland, thymus, adrenal gland, pancreas, ovary, testis, heart, blood vessel, kidney, uterus, urinary bladder, urethra, prostate gland, penis, prostate, testis, scrotum, ductus deferens, mammary glands, ovary, uterus, vagina, or uterine tube.

[0153] In embodiments, the tissue section includes a tissue or a cell. Biological tissue samples suitable for use with the methods and systems described herein generally include any type of tissue samples collected from living or dead subjects, such as, for example, tumor tissue and autopsy samples. Tissue samples may be collected and processed using the methods and systems described herein and subjected to microscopic analysis immediately following processing, or may be preserved and subjected to microscopic analysis at a future time, e.g., after storage for an extended period of time. In some embodiments, the methods described herein may be used to preserve tissue samples in a stable, accessible and fully intact form for future analysis. For example, tissue samples, such as, e.g., human tumor tissue samples, may be processed as described herein and cleared to remove a plurality of cellular components, such as, e.g., lipids, and then stored for future analysis. In some embodiments, the methods and systems described herein may be used to analyze a fresh tissue section. In some embodiments, the methods and systems described herein may be used to analyze a previously-preserved (e.g., previously fixed) or stored tissue section (e.g., tissue sample). For example, in some embodiments a previously-preserved tissue sample that has not been subjected to a sample preparation process described herein may be processed and analyzed as described herein. In particular methods, a tissue sample is frozen prior to being processed as described herein.

[0154] In embodiments, prior to contacting the tissue with a probe oligonucleotide, the method further includes immobilizing the tissue section onto a solid support (e.g., a flow cell or well in a microplate). In embodiments, the solid support includes a glass substrate. In embodiments, the glass substrate is a borosilicate glass substrate with a composition including SiO₂, Al₂O₃, B₂O₃, Li₂O, Na₂O, K₂O, MgO, CaO, SrO, BaO, ZnO, TiO₂, ZrO₂, P₂O₅, or a combination thereof (see e.g., U.S. Pat. No. 10,974,990). In embodiments, the glass substrate is an alkaline earth boro-aluminosilicate glass substrate.

[0155] In embodiments, the solid support includes a polymer layer. In embodiments, the polymer layer includes polymerized units of alkoxysilyl methacrylate, alkoxysilyl acrylate, alkoxysilyl methylacrylamide, alkoxysilyl methylacrylamide, or a copolymer thereof. In embodiments, the polymer layer includes polymerized units of alkoxysilyl methacrylate. In embodiments, the polymer layer includes polymerized units of alkoxysilyl acrylate. In embodiments, the polymer layer includes polymerized units of alkoxysilyl methylacrylamide. In embodiments, the polymer layer includes polymerized units of alkoxysilyl methylacrylamide. In embodiments, the polymer layer includes glycidyloxypropyl-trimethyloxysilane. In embodiments, the polymer layer includes methacryloxypropyl-trimethoxysilane. In embodiments, the polymer layer includes polymerized units of

[chemical structure]

or a copolymer thereof. In embodiments, the polymer layer is an organically-modified ceramic polymer. In embodiments, the polymer includes polymerized monomers of alkoxysilyl polymers, such as

[chemical structure]

In embodiments, the solid support includes polymerized units of

[chemical structure]

In embodiments, the solid support includes polymerized units of

[chemical structure]

In embodiments, the solid support includes polymerized unites of

[chemical structure]

In embodiments, the polymer layer includes one or more ceramic particles, (e.g., silicates, aluminates, and titanates). In embodiments, the polymer layer includes tantalum(V) oxide, titanium dioxide, zinc oxide, and/or iron oxide.

[0156] In embodiments, the method further includes permeabilizing the tissue prior to binding the probe to the biomolecule. Methods for permeabilization are known in the art, as exemplified by Cremer et al., The Nucleus: Volume 1: Nuclei and Subnuclear Components, R. Hancock (ed.) 2008; and Larsson et al., Nat. Methods (2010) 7:395-397, the content of each of which is incorporated herein by reference in its entirety. In embodiments, the tissue and/or cell is cleared (e.g., digested) of proteins, lipids, or proteins and lipids. In embodiments, permeabilizing the tissue or cell does not release the biomolecules (e.g., the one or more biomolecules) from within the tissue or cell. For example, after a fixation process (e.g. formaldehyde cross-linking), proteins and nucleic acids are immobilized within the cells of a tissue section, and are therefore not liberated into the environment following permeabilization of the cells. In embodiments, permeabilizing includes contacting the sample (e.g., the cell or tissue) with a permeabilization agent. Suitable agents for this purpose include, but are not limited to, organic solvents (e.g., acetone, ethanol, and methanol), cross-linking agents (e.g., paraformaldehyde), detergents (e.g., saponin, Triton X100™, Tween-20™, or sodium dodecyl sulfate (SDS)), and enzymes (e.g., trypsin, proteases (e.g., proteinase K). In embodiments, the detergent is an anionic detergent (e.g., SDS or N-lauroylsarcosine sodium salt solution). In embodiments, the permeabilization agent includes polyethylene glycol (PEG). In embodiments, the PEG is from about PEG 2K to about PEG 16K. In some embodiments, the PEG is PEG 2K, 3K, 4K, 5K, 6K, 7K, 8K, 9K, 10K, 11K, 12K, 13K, 14K, or 16K. In embodiments, the PEG is present at a concentration from about 2% to 25%, from about 4% to about 23%, from about 6% to about 21%, or from about 8% to about 20% (v/v).

[0157] Imaging deep into a tissue volume is problematic due to inherently fluorescent molecules present in the tissue or introduced during processing which give rise to autofluorescence that masks fluorescently labelled structures of interest. Typically, autofluorescence decreases image quality by lowering the signal to noise ratio across multiple fluorescence channels and undermines sharp images. Autofluorescence may arise from endogenous fluorescent biomolecules (NADPH, collagen, flavins, tyrosine, and others) or be introduced by the formation of Schiffs bases during fixation with aldehydes (e.g., glutaraldehyde and paraformaldehyde). Additional light scattering is provided by various cellular components, such as ribosomes, nuclei, nucleoli, mitochondria, lipid droplets, membranes, myelin, cytoskeletal components, and extracellular matrix components such as collagen and elastin.

[0158] In embodiments, the tissue is cleared using a solvent-based clearing approach. Solvent-based clearing techniques typically includes two steps: 1) dehydration (e.g., contacting the sample with methanol with or without hexane or, tetrahydrofuran (THF) alone) and 2) clearing by refractive index matching to the remaining dehydrated tissue's index (e.g., contacting the tissue sample with methyl salicylate, benzyl alcohol, benzyl benzoate, dichloromethane, or dibenzyl ether). Alternatively, the initial dehydration may be performed using phosphate buffered saline (PBS), detergent, and dimethyl sulfoxide (DMSO). In embodiments, the tissue is cleared by contacting the tissue sample with an aqueous solution containing sucrose, fructose, 2,2′-thiodiethanol (TDE), or formamide.

[0159] In embodiments, the tissue is cleared utilizing the 3D imaging of solvent-cleared organs (3DISCO) method as described in Ertürk A et al. Nat Protoc. 2012 November; 7(11):1983-95, which is incorporated herein by reference. For example, a sample is incubated overnight in 50% v/v tetrahydrofuran/H₂O (THF), followed by incubation for at least one hour 80% THF/H₂O and followed by incubation in a 100% THF solution. This is then followed by contacting the sample with dichloromethane (DCM) and an incubation in dibenzyl ether (DBE) until clear. In embodiments, the tissue is cleared according to a known technique in the art, for example CLARITY (Chung K., et al. Nature 497, 332-337 (2013)), PACT-PARS (Yang B et al. Cell 158, 945-958 (2014)), CUBIC (Susaki E. A. et al. Cell 157, 726-739 (2014), 18), ScaleS (Hama H., et al. Nat. Neurosci. 18, 1518-1529 (2015)), OPTIClear (Lai H. M., et al. Nat. Commun. 9, 1066 (2018)), Cₑ3D (Li W., et al. Proc. Natl. Acad. Sci. U.S.A. 114, E7321-E7330 (2017)), BABB (Dodt H. U. et al. Nat. Methods 4, 331-336 (2007)), iDISCO (Renier N., et al. Cell 159, 896-910 (2014)), uDISCO (Pan C., et al. Nat. Methods 13, 859-867 (2016)), FluoClearBABB (Schwarz M. K., et al. PLOS ONE 10, e0124650 (2015)), Ethanol-ECi (Klingberg A., et al. J. Am. Soc. Nephrol. 28, 452-459 (2017)), and PEGASOS (Jing D. et al. Cell Res. 28, 803-818 (2018)).

[0160] In embodiments, the tissue is contacted with an alkaline solution containing a combination of 2,2′-thiodiethanol (TDE), DMSO, D-sorbitol, and Tris. In embodiments, the tissue section is contacted with an aqueous solution including 20% (vol/vol) DMSO, 40% (vol/vol) TDE, 20% (wt/vol) sorbitol, and 6% (wt/vol, equal to 0.5 M) Tris base. In embodiments, the tissue section is contacted with an aqueous solution including 25% (wt/wt) urea, 25% (wt/wt) N,N,N′,N′-Tetrakis (2-hydroxypropyl) ethylenediamine, and 15% (wt/wt) Triton X-100. In embodiments, the tissue section is contact with an aqueous solution including 9.1 M urea, 22.5% (wt/vol) D-sorbitol, and 5% (wt/vol) Triton X-100. In embodiments, the tissue section is contact with an aqueous solution including 30% (wt/vol) urea, 20% (wt/vol) D-sorbitol, and 5% (wt/vol) glycerol dissolved in DMSO. In embodiments, the tissue or cell is contacted with an aqueous solution according to the protocols described in Shan, Q H., Qin, X Y., Zhou, N. et al. BMC Biol 20, 77 (2022).

[0161] To microscopically visualize tissue sections prepared by the subject methods, in some embodiments the tissue section is embedded in a mounting medium. Mounting medium is typically selected based on its suitability for the reagents used to visualize the cellular biomolecules, the refractive index of the tissue section, and the microscopic analysis to be performed. For example, for phase-contrast work, the refractive index of the mounting medium should be different from the refractive index of the specimen, whereas for bright-field work the refractive indexes should be similar. As another example, for epifluorescence work, a mounting medium should be selected that reduces fading, photobleaching or quenching during microscopy or storage. In certain embodiments, a mounting medium or mounting solution may be selected to enhance or increase the optical clarity of the cleared tissue specimen. Nonlimiting examples of suitable mounting media that may be used include glycerol, CC/Mount™, Fluoromount™ Fluoroshield™, ImmunHistoMount™, Vectashield™, Permount™, Acrytol™, CureMount™ FocusClear™, or equivalents thereof.

[0162] In an aspect is provided a method of imaging a cell or tissue. In embodiments, the method includes: contacting a cell or tissue with a first probe set, wherein the first probe set includes a plurality of probes as described herein; binding each probe to a different target of the cell or tissue; imaging (e.g., obtaining an image) the cell or tissue; contacting the cell or tissue with a second probe set, wherein the second probe set includes a plurality of probes as described herein; binding each probe to a different target of the cell or tissue; and imaging (e.g., obtaining an image) the cell or tissue.

[0163] In embodiments, amplifying the circular polynucleotide generates an amplification product including multiple copies of the target sequence, or a complement thereof. In embodiments, the method includes serially cycling through detection cycles to determine the sequence (e.g., the order of the nucleotides) of the target sequence), wherein each detection cycle includes hybridizing, detecting, and removing a fluorescently labelled oligonucleotide. In embodiments, detecting includes sequencing the amplification product (e.g., using a sequencing by synthesis or sequencing by binding process).

[0164] In embodiments, forming the circular polynucleotide includes ligating a first end and a second end of the oligonucleotide probe together. In embodiments, ligating includes forming a covalent bond from the first end and the second end. As those of skill in the art appreciate, two nucleotide sequences that that are to ligated together will generally directly abut one another.

[0165] In embodiments, the method includes contacting a cell or tissue with a polynucleotide probe and hybridizing a first hybridization sequence of the polynucleotide probe to a first target sequence of the RNA or DNA molecule, and hybridizing a second hybridization sequence of the polynucleotide probe to a second target sequence of the RNA or DNA molecule, ligating the first hybridization sequence and the second hybridization sequence together thereby forming a circular oligonucleotide; extending an amplification primer hybridized to the circular oligonucleotide with a polymerase to generate an extension product comprising the target sequence; and hybridizing a sequencing primer to the extension product and sequencing the target sequence (i.e., the first and/or second hybridization sequence) in the cell or tissue, thereby detecting the RNA or DNA molecule. In embodiments, the nucleic acid molecule is cDNA. In embodiments, the nucleic acid molecule is DNA. In embodiments, the nucleic acid molecule is RNA. In embodiments, the target is an RNA nucleic acid sequence or DNA nucleic acid sequence. In embodiments, the target is an RNA nucleic acid sequence or DNA nucleic acid sequence from the same cell.

[0166] In embodiments, the method includes circularizing and ligating the complementary sequence to the 5′ end of the polynucleotide probe. In embodiments, circularizing the oligonucleotide primer to generate a circular oligonucleotide includes extending the 3′ end of the oligonucleotide primer (e.g., extending the 3′ end of the primer using a polymerase (e.g., a Thermus thermophilus (Tth) DNA polymerase) to incorporate one or more nucleotides) along the target nucleic acid to generate a complementary sequence (e.g., complementary to the target nucleic acid, for example a target RNA sequence), and ligating the complementary sequence to the 5′ end of the oligonucleotide primer. In embodiments, the ligation includes enzymatic ligation. In embodiments, ligating includes enzymatic ligation including a ligation enzyme (e.g., Circligase enzyme, Taq DNA Ligase, HiFi Taq DNA Ligase, T4 ligase, PBCV-1 DNA Ligase (also known as SplintR® ligase) or Ampligase DNA Ligase). Non-limiting examples of ligases include DNA ligases such as DNA Ligase I, DNA Ligase II, DNA Ligase III, DNA Ligase IV, T4 DNA ligase, T7 DNA ligase, T3 DNA Ligase, E. coli DNA Ligase, PBCV-1 DNA Ligase (also known as SplintR ligase) or a Taq DNA Ligase. In embodiments, the ligase enzyme includes a T4 DNA ligase, T4 RNA ligase 1, T4 RNA ligase 2, T3 DNA ligase or T7 DNA ligase. In embodiments, the enzymatic ligation is performed by a mixture of ligases. In embodiments, the ligation enzyme is selected from the group consisting of T4 DNA ligase, T4 RNA ligase 1, T4 RNA ligase 2, RtcB ligase, T3 DNA ligase, T7 DNA ligase, Taq DNA ligase, PBCV-1 DNA Ligase, a thermostable DNA ligase (e.g., 5′AppDNA/RNA ligase), an ATP dependent DNA ligase, an RNA-dependent DNA ligase (e.g., SplintR ligase), and combinations thereof.

[0167] In embodiments, amplifying the circular polynucleotide includes hybridizing a primer to the circular polynucleotide and extending the primer with a strand-displacing polymerase. In embodiments, the method further includes amplifying the circular oligonucleotide by extending an amplification primer with a polymerase (e.g., a strand-displacing polymerase), wherein the primer extension generates an extension product including multiple complements of the circular oligonucleotide, referred to as an amplicon. An amplicon typically contains multiple, tandem copies of the circularized nucleic acid molecule of the corresponding sample nucleic acid. The number of copies can be varied by appropriate modification of the reaction conditions, such as varying the number of amplification cycles, using polymerases of varying processivity in the amplification reaction, or varying the length of time that the amplification reaction is run. In embodiments, the extension product includes three or more copies of the circular oligonucleotide. In embodiments, the circular oligonucleotide is copied about 3-50 times (i.e., the extension product includes about 3 to 50 complements of the circular oligonucleotide). In embodiments, the circular oligonucleotide is copied about 50-100 times (i.e., the extension product includes about 50 to 100 complements of the circular oligonucleotide). In embodiments, the circular oligonucleotide is copied about 100-300 times (i.e., the extension product includes about 100 to 300 complements of the circular oligonucleotide). In embodiments, the method includes hybridizing an amplification primer and oligonucleotide primer in the same reaction (e.g., simultaneously). In embodiments, the oligonucleotide is extended as an amplification primer after generating the circular oligonucleotide (e.g., the 3′ end of the oligonucleotide hybridized to the circular oligonucleotide is extended with a polymerase). In embodiments, the method includes contacting the target with an amplification primer and oligonucleotide primer in the same reaction (e.g., simultaneously). In embodiments, the method includes fixing the amplification products (e.g., contacting the amplification product with formalin). In embodiments, amplifying includes incubating the circular polynucleotide with a strand-displacing polymerase for about 15 minutes to about 2 hours. In embodiments, amplifying includes incubating the circular polynucleotide with a strand-displacing polymerase for about 30 minutes to about 60 minutes. In embodiments, amplifying includes binding an amplification primer to the primer binding sequence and extending the amplification primer with a strand-displacing polymerase.

[0168] In embodiments, sequencing includes hybridizing a sequencing primer to the amplification product and incorporating one or more labeled nucleotides, and detecting the incorporated one or more labeled nucleotides so as to identify the sequence.

[0169] In embodiments, the method includes sequencing the extension products, which includes the target nucleic acid sequence. A variety of sequencing methodologies can be used such as sequencing-by synthesis (SBS), pyrosequencing, sequencing by ligation (SBL), or sequencing by hybridization (SBH). Pyrosequencing detects the release of inorganic pyrophosphate (PPi) as particular nucleotides are incorporated into a nascent nucleic acid strand (Ronaghi, et al., Analytical Biochemistry 242(1), 84-9 (1996); Ronaghi, Genome Res. 11(1), 3-11 (2001); Ronaghi et al. Science 281(5375), 363 (1998); U.S. Pat. Nos. 6,210,891; 6,258,568; and. 6,274,320, each of which is incorporated herein by reference in its entirety). In pyrosequencing, released PPi can be detected by being converted to adenosine triphosphate (ATP) by ATP sulfurylase, and the level of ATP generated can be detected via light produced by luciferase. In this manner, the sequencing reaction can be monitored via a luminescence detection system. In both SBL and SBH methods, target nucleic acids, and amplicons thereof, are subjected to repeated cycles of oligonucleotide delivery and detection. SBL methods, include those described in Shendure et al. Science 309:1728-1732 (2005); U.S. Pat. Nos. 5,599,675; and 5,750,341, each of which is incorporated herein by reference in its entirety; and the SBH methodologies are as described in Bains et al., Journal of Theoretical Biology 135(3), 303-7 (1988); Drmanac et al., Nature Biotechnology 16, 54-58 (1998); Fodor et al., Science 251(4995), 767-773 (1995); and WO 1989/10977, each of which is incorporated herein by reference in its entirety.

[0170] In SBS, extension of a nucleic acid primer along a nucleic acid template is monitored to determine the sequence of nucleotides in the template. The underlying chemical process can be catalyzed by a polymerase, wherein fluorescently labeled nucleotides are added to a primer (thereby extending the primer) in a template dependent fashion such that detection of the order and type of nucleotides added to the primer can be used to determine the sequence of the template. In embodiments, sequencing includes annealing and extending a sequencing primer to incorporate a detectable label that indicates the identity of a nucleotide in the target polynucleotide, detecting the detectable label, and repeating the extending and detecting of steps. In embodiments, the methods include sequencing one or more bases of a target nucleic acid by extending a sequencing primer hybridized to a target nucleic acid (e.g., an amplification product produced by the amplification methods described herein). In embodiments, sequencing may be accomplished by a sequencing-by-synthesis (SBS) process. In embodiments, sequencing includes a sequencing by synthesis process, where individual nucleotides are identified iteratively, as they are polymerized to form a growing complementary strand. In embodiments, nucleotides added to a growing complementary strand include both a label and a reversible chain terminator that prevents further extension, such that the nucleotide may be identified by the label before removing the terminator to add and identify a further nucleotide. Such reversible chain terminators include removable 3′ blocking groups, for example as described in U.S. Pat. Nos. 7,541,444 and 7,057,026. Once such a modified nucleotide has been incorporated into the growing polynucleotide chain complementary to the region of the template being sequenced, there is no free 3′-OH group available to direct further sequence extension and therefore the polymerase cannot add further nucleotides. Once the identity of the base incorporated into the growing chain has been determined, the 3′ reversible terminator may be removed to allow addition of the next successive nucleotide. By ordering the products derived using these modified nucleotides it is possible to deduce the DNA sequence of the oligonucleotide target nucleic acid sequence.

[0171] In embodiments, sequencing includes sequentially extending a plurality of sequencing primers (e.g., sequencing a first region of a target nucleic acid followed by sequencing a second region of a target nucleic acid, followed by sequencing N regions, where N is the number of sequencing primers in the known sequencing primer set). In embodiments, sequencing includes generating a plurality of sequencing reads.

[0172] In embodiments, the method includes sequencing the amplification products (e.g., a plurality of different amplification products). In embodiments, sequencing includes a plurality of sequencing cycles. In embodiments, sequencing includes a plurality of rounds of sequencing cycles (e.g., a first round of 10 sequencing cycles; followed by a second round of 10 sequencing cycles). In embodiments, sequencing includes a plurality of rounds of sequencing cycles (e.g., a first round of 1 sequencing cycle; followed by a second round of 1 sequencing cycle). In embodiments, sequencing includes 20 to 100 sequencing cycles. In embodiments, sequencing includes 50 to 100 sequencing cycles. In embodiments, sequencing includes 50 to 300 sequencing cycles. In embodiments, sequencing includes 50 to 150 sequencing cycles. In embodiments, sequencing includes at least 10, 20, 30 40, or 50 sequencing cycles. In embodiments, sequencing includes at least 10 sequencing cycles. In embodiments, sequencing includes 10 to 20 sequencing cycles. In embodiments, sequencing includes 10, 11, 12, 13, 14, or 15 sequencing cycles. In embodiments, sequencing includes (a) extending a sequencing primer by incorporating a labeled nucleotide, or labeled nucleotide analogue and (b) detecting the label to generate a signal for each incorporated nucleotide or nucleotide analogue. In embodiments, prior to initiating a next round of sequencing cycles, the first sequencing primer is terminated or removed. For example, termination may occur via incorporating a non-extendable nucleotide (e.g., a ddNTP or acyclic nucleotide) into the first sequencing primer.

[0173] In embodiments, sequencing includes sequentially sequencing a plurality of different targets by initiating sequencing with different sequencing primers. For example, a first circularizable probe includes a first primer binding site (a nucleic acid sequence complementary to a first sequencing primer) and optionally a first barcode sequence or barcode nucleotide. In a similar manner, a second and third padlock probe include a second primer binding site (a nucleic acid sequence complementary to a second, different, sequencing primer) and a third primer binding site (a nucleic acid sequence complementary to a third, different from both Primer 1 and Primer 2, sequencing primer), respectively. During the first round of sequencing (following probe circularization and amplification according to the methods described herein), using primer 1, the probe hybridized to the first nucleic acid molecule is detected. In the second round of sequencing, primer 2 can hybridize and sequence an identifying sequence of the probe (e.g., a barcode sequence or nucleotide) hybridized to a second nucleic acid molecule. Similarly, in the third round of sequencing, primer 3 can hybridize and sequence the probe hybridized to the third nucleic acid molecule. In embodiments, each oligonucleotide probe further includes a barcode sequence. In embodiments, the barcode (i.e., the barcode sequence) is at least 5, 6, 7, 8, 9, 10, 11, 12, 13, 14, or 15 nucleotides in length. In embodiments, the barcode is 5, 6, 7, 8, 9, 10, 11, 12, 13, 14, or 15 nucleotides in length. In embodiments, the barcode is 10 to 15 nucleotides in length. In embodiments, the barcode is at least about 1, 2, 3, 4, 5, 6, 7, 8, 9, 10, 15, 20, 25, 30, 35, 40, 45, 50 or more nucleotides in length. In embodiments, the barcode can be at most about 300, 200, 100, 90, 80, 70, 60, 50, 40, 30, 20, 15, 12, 10, 9, 8, 7, 6, 5, 4 or fewer or more nucleotides in length. In embodiments, the barcode includes between about 5 to about 8, about 5 to about 10, about 5 to about 15, about 5 to about 20, about 10 to about 150 nucleotides. In embodiments, the barcode includes between 5 to 8, 5 to 10, 5 to 15, 5 to 20, 10 to 150 nucleotides. In embodiments, the barcode is 10 nucleotides. In embodiments, the barcode may include a unique sequence (e.g., a barcode sequence) that gives the barcode its identifying functionality. The unique sequence may be random or non-random. The random sequence can be of any suitable length, and there may be one or more than one present. As non-limiting examples, the random sequence may have a length of 10 to 40, 10 to 30, 10 to 20, 25 to 50, 15 to 40, 15 to 30, 20 to 50, 20 to 40, or 20 to 30 nucleotides.

[0174] In embodiments, sequencing includes encoding the sequencing read into a codeword. Useful encoding schemes include those developed for telecommunications, coding theory and information theory such as those set forth in Hamming, Coding and Information Theory, 2^{nd} Ed. Prentice Hall, Englewood Cliffs, N.J. (1986) and Moon T K. Error Correction Coding: Mathematical Methods and Algorithms. ed. 1st Wiley: 2005, each of which are incorporated herein by reference. A useful encoding scheme uses a Hamming code. A Hamming code can provide for signal (and therefore sequencing and barcode) distinction. In this scheme, signal states detected from a series of nucleotide incorporation and detection events (i.e., while sequencing the oligonucleotide barcode) can be represented as a series of the digits to form a codeword, the codeword having a length equivalent to the number incorporation/detection events. The digits can be binary (e.g. having a value of 1 for presence of signal and a value of 0 for absence of the signal) or digits can have a higher radix (e.g., a ternary digit having a value of 1 for fluorescence at a first wavelength, a value of 2 for fluorescence at a second wavelength, and a value of 0 for no fluorescence at those wavelengths, etc.). Barcode discrimination capabilities are provided when codewords can be quantified via Hamming distances between two codewords (i.e., barcode 1 having codeword 1, and barcode 2 having codeword 2, etc.).

[0175] In embodiments, generating a sequencing read includes determining the identity of the nucleotides in the template polynucleotide (or complement thereof). In embodiments, a sequencing read, e.g., a first sequencing read or a second sequencing read, includes determining the identity of a portion (e.g., 1, 2, 5, 10, 20, 50 nucleotides) of the total template polynucleotide. In embodiments the first sequencing read determines the identity of 5-10 nucleotides and the second sequencing read determines the identity of more than 5-10 nucleotides (e.g., 11 to 200 nucleotides). In embodiments the first sequencing read determines the identity of more than 5-10 nucleotides (e.g., 11 to 200 nucleotides) and the second sequencing read determines the identity of 5-10 nucleotides. In embodiments, following the generation of a sequencing read, subsequent extension is performed using a plurality of standard (e.g., non-modified) dNTPs until the complementary strand is copied. In other embodiments, following the generation of a sequencing read, subsequent extension is performed using a plurality of dideoxy nucleotide triphosphates (ddNTPs) or acyclic nucleotide triphosphates to prevent further extension of the first sequencing read product during a second sequencing read. In embodiments, following the identification of at least 5-10 (e.g., 11 to 200 nucleotides, or up to 1000 nucleotides), subsequent extension is performed using a plurality of standard (e.g., non-modified) dNTPs until the complementary strand is copied. In embodiments, following the identification of at least 5-10 (e.g., 11 to 200 nucleotides, or up to 1000 nucleotides), subsequent extension is performed using a plurality of dideoxy nucleotide triphosphates (ddNTPs) or acyclic nucleotide triphosphates to prevent further extension of the sequencing read product.

[0176] In embodiments, sequencing includes sequencing by synthesis, sequencing by binding, or sequencing by ligation. In embodiments, sequencing includes extending a sequencing primer by incorporating a labeled nucleotide or labeled nucleotide analogue, and detecting the label to generate a signal for each incorporated nucleotide or nucleotide analogue, wherein the sequencing primer is hybridized to the amplification product. In embodiments, the sequencing primer includes the sequence: SEQ ID NO:10531, SEQ ID NO:10532, SEQ ID NO:10533, SEQ ID NO:10534, SEQ ID NO:10535, SEQ ID NO:10536, SEQ ID NO:10537, SEQ ID NO:10538, SEQ ID NO:10539, SEQ ID NO:10540, SEQ ID NO:10541, SEQ ID NO:10542, SEQ ID NO:10543, or SEQ ID NO:10544.

[0177] In embodiments, the method includes binding a specific binding reagent including an oligonucleotide to a protein in the tissue, binding a circularizable oligonucleotide to the oligonucleotide, circularizing the circularizable oligonucleotide to form a second circular polynucleotide, amplifying the second circular polynucleotide to form a second amplification product; and detecting the amplification product. In embodiments, the specific binding reagent is selected from an antibody, single-chain Fv fragment (scFv), antibody fragment antigen-binding (Fab), or an aptamer.

[0178] In embodiments, the method includes identifying and analyzing the unique characteristics of T-cell receptors (TCRs) in a given population of T-cells. T-cells, a type of white blood cell, play a crucial role in the immune response. Each T-cell has a unique TCR that enables it to recognize specific antigens. Clonality, in this context, pertains to the presence of T-cells with identical TCRs, indicating that they have originated from the same initial T-cell. The process of identifying clonality data typically involves sequencing, which identifies the unique genetic sequences of the TCRs. This data provides insights into the diversity and specificity of the T-cell response. In medical research and diagnostics, analyzing T-cell clonality is important for understanding immune responses in diseases such as cancer, autoimmune disorders, and infections.

[0179] In an aspect is provided a method of detecting a plurality of targets. In embodiments, the method includes sequencing a plurality of target nucleic acids of a cell in situ. In embodiments, the method includes the following steps in situ for each of the plurality of target nucleic acids: i) hybridizing an oligonucleotide primer to the target nucleic acid, wherein the oligonucleotide primer includes a first region at a 3′ end that hybridizes to a first complementary region of the target nucleic acid, and a second region at a 5′ end that hybridizes to a second complementary region of the target nucleic acid, wherein the second complementary region is 5′ with respect to the first complementary region; ii) circularizing the oligonucleotide primer to generate a circular oligonucleotide, wherein circularizing includes extending the 3′ end of the oligonucleotide primer (e.g., extending the 3′ end of the primer using a polymerase (e.g., a Thermus thermophilus (Tth) DNA polymerase) to incorporate one or more nucleotides) along the target nucleic acid to generate a complementary sequence (e.g., complementary to the target nucleic acid, for example a target RNA sequence), and ligating the complementary sequence to the 5′ end of the oligonucleotide primer; iii) amplifying the circular oligonucleotide by extending an amplification primer hybridized to the circular oligonucleotide with a strand-displacing polymerase, wherein the amplification primer extension generates an extension product including multiple complements of the circular oligonucleotide; and iv) sequencing the extension product of step (iii).

[0180] In an aspect is provided a method of detecting a plurality of different nucleic acid sequences within an optically resolved volume of a cell in situ, wherein the method includes i) associating a different oligonucleotide barcode from a known set of barcodes with each of the plurality of targets, wherein associating an oligonucleotide barcode with each of the plurality of targets includes hybridizing a padlock probe to two adjacent nucleic acid sequences of the target, wherein the padlock probe is a single-stranded polynucleotide having a 5′ and a 3′ end, and wherein the padlock probe includes a primer binding sequence from a known set of primer binding sequences; ii) sequencing each barcode to obtain a multiplexed signal in the cell in situ; iii) demultiplexing the multiplexed signal by comparison with the known set of barcodes; and iv) detecting the plurality of targets by identifying the associated barcodes detected in the cell.

[0181] In another aspect is provided a method of detecting a plurality of proteins (e.g., different proteins) within an optically resolved volume of a cell in situ, wherein the method includes i) associating a different oligonucleotide barcode from a known set of barcodes with each of the plurality of targets, wherein associating an oligonucleotide barcode with each of the plurality of targets includes contacting each of the targets with a specific binding reagent, wherein the specific binding reagent includes an oligonucleotide barcode; ii) hybridizing a padlock probe to two adjacent nucleic acid sequences of the barcode, wherein the padlock probe is a single-stranded polynucleotide having a 5′ and a 3′ end, and wherein the padlock probe includes a primer binding sequence from a known set of primer binding sequences; iii) detecting (e.g., sequencing) each barcode to obtain a multiplexed signal in the cell in situ; iv) demultiplexing the multiplexed signal by comparison with the known set of barcodes; and v) detecting the plurality of targets by identifying the associated barcodes detected in the cell. In another aspect is provided a method of detecting a plurality of proteins (e.g., different proteins) within an optically resolved volume of a cell in situ, wherein the method includes i) associating a different oligonucleotide barcode from a known set of barcodes with each of the plurality of targets, wherein associating an oligonucleotide barcode with each of the plurality of targets includes contacting each of the targets with a specific binding reagent, wherein the specific binding reagent includes an oligonucleotide barcode; ii) detecting (e.g., sequencing) each barcode to obtain a multiplexed signal in the cell in situ; iii) demultiplexing the multiplexed signal by comparison with the known set of barcodes; and iv) detecting the plurality of targets by identifying the associated barcodes detected in the cell.

[0182] In embodiments, the targets are proteins or carbohydrates. In embodiments, the targets are proteins. In embodiments, the targets are carbohydrates. In embodiments when the target are proteins and/or carbohydrates, the method includes contacting the proteins with a specific binding reagent, wherein the specific binding reagent comprises an oligonucleotide barcode. In embodiments, the specific binding reagent comprises an antibody, single-chain Fv fragment (scFv), antibody fragment-antigen binding (Fab), or an aptamer. In embodiments, the specific binding reagent is a peptide, a cell penetrating peptide, an aptamer, a DNA aptamer, an RNA aptamer, an antibody, an antibody fragment, a light chain antibody fragment, a single-chain variable fragment (scFv), a lipid, a lipid derivative, a phospholipid, a fatty acid, a triglyceride, a glycerolipid, a glycerophospholipid, a sphingolipid, a saccharolipid, a polyketide, a polylysine, polyethyleneimine, diethylaminoethyl (DEAE)-dextran, cholesterol, or a sterol moiety. In embodiments, the specific binding reagent interacts (e.g., contacts, or binds) with one or more specific binding reagents on the cell surface. Carbohydrate-specific antibodies are known in the art, see for example Kappler, K., Hennet, T. Genes Immun 21, 224-239 (2020).

[0183] In embodiments, associating an oligonucleotide barcode with each of the plurality of targets includes contacting each of the targets with a specific binding reagent, wherein the specific binding reagent includes a circular polynucleotide which includes the oligonucleotide barcode. For example, in embodiments the specific binding reagent is bound (e.g., covalently linked via a tethered capture oligonucleotide, wherein the capture oligonucleotide is hybridized to the circular polynucleotide) to a circular polynucleotide before contacting the target. In embodiments, the specific binding reagent includes an antibody, single-chain Fv fragment (scFv), antibody fragment-antigen binding (Fab), or an aptamer. In embodiments, the specific binding reagent is an antibody, single-chain Fv fragment (scFv), antibody fragment-antigen binding (Fab), or an aptamer. In embodiments, the circular polynucleotide includes a primer binding sequence from a known set of primer binding sequences.

[0184] In embodiments, the known set of primer binding sequences includes at least 2 different primer binding sequences. In embodiments, the known set of primer binding sequences includes two or more different primer binding sequences. In embodiments, the known set of primer binding sequences includes at least 3 different primer binding sequences. In embodiments, the known set of primer binding sequences includes three or more different primer binding sequences. In embodiments, the known set of primer binding sequences includes at least 2 different sequencing primer binding sequences. In embodiments, the known set of primer binding sequences includes two or more different sequencing primer binding sequences. In embodiments, the known set of primer binding sequences includes 2 to 10 different sequencing primer binding sequences. In embodiments, the known set of primer binding sequences includes 2 to 6 different sequencing primer binding sequences. In embodiments, the known set of primer binding sequences includes 3 to 8 different sequencing primer binding sequences.

[0185] In embodiments the target is an RNA transcript. In embodiments the target is a single stranded RNA nucleic acid sequence. In embodiments, the target is an RNA nucleic acid sequence or a DNA nucleic acid sequence (e.g., cDNA). In embodiments, the target is a cDNA target nucleic acid sequence and before step i), the RNA nucleic acid sequence is reverse transcribed to generate the cDNA target nucleic acid sequence. In embodiments, reverse transcription of the RNA nucleic acid is performed with a reverse transcriptase, for example, Tth DNA polymerase or mutants thereof. In embodiments, the target is genomic DNA (gDNA), mitochondrial DNA, chloroplast DNA, episomal DNA, viral DNA, or copy DNA (cDNA). In embodiments, the target is coding RNA such as messenger RNA (mRNA), and non-coding RNA (ncRNA) such as transfer RNA (tRNA), microRNA (miRNA), small nuclear RNA (snRNA), or ribosomal RNA (rRNA). In embodiments, the target is a cancer-associated gene. In embodiments, to minimize amplification errors or bias, the target is not reverse transcribed to generate cDNA.

[0186] In embodiments, the target is an RNA nucleic acid sequence or DNA nucleic acid sequence. In embodiments, the target is an RNA nucleic acid sequence or DNA nucleic acid sequence from the same cell. In embodiments, the target is an RNA nucleic acid sequence. In embodiments, the RNA nucleic acid sequence is stabilized using known techniques in the art. For example, RNA degradation by RNase should be minimized using commercially available solutions, e.g., RNA Later®, RNA Lysis Buffer, or Keratinocyte serum-free medium). In embodiments, the target is messenger RNA (mRNA), transfer RNA (tRNA), micro RNA (miRNA), small interfering RNA (siRNA), small nucleolar RNA (snoRNA), small nuclear RNA (snRNA), Piwi-interacting RNA (piRNA), enhancer RNA (eRNA), or ribosomal RNA (rRNA). In embodiments, the target is pre-mRNA. In embodiments, the target is heterogeneous nuclear RNA (hnRNA). In embodiments, the target is mRNA, tRNA (transfer RNA), rRNA (ribosomal RNA), or noncoding RNA (such as lncRNA (long noncoding RNA)). In embodiments, the targets are on different regions of the same RNA nucleic acid sequence. In embodiments, the targets are cDNA target nucleic acid sequences and before step i), the RNA nucleic acid sequences are reverse transcribed to generate the cDNA target nucleic acid sequences. In embodiments, reverse transcription of the RNA nucleic acid is performed with a reverse transcriptase, for example, Tth DNA polymerase or mutants thereof. In embodiments, the targets are not reverse transcribed to cDNA, i.e., the oligonucleotide primer is hybridized directly to the target nucleic acid.

[0187] In embodiments, the methods and compositions described herein are utilized to analyze the various sequences of TCRs and BCRs from immune cells, for example various clonotypes. In embodiments, the target nucleic acid includes a nucleic acid sequence encoding a TCR alpha chain, a TCR beta chain, a TCR delta chain, a TCR gamma chain, or any fragment thereof (e.g., variable regions including VDJ or VJ regions, constant regions, transmembrane regions, fragments thereof, combinations thereof, and combinations of fragments thereof). In embodiments, the target nucleic acid includes a nucleic acid sequence encoding a B cell receptor heavy chain, B cell receptor light chain, or any fragment thereof (e.g., variable regions including VDJ or VJ regions, constant regions, transmembrane regions, fragments thereof, combinations thereof, and combinations of fragments thereof). In embodiments, the target nucleic acid includes a CDR3 nucleic acid sequence. In embodiments, the target nucleic acid includes a TCRA gene sequence or a TCRB gene sequence. In embodiments, the target nucleic acid includes a TCRA gene sequence and a TCRB gene sequence. In embodiments, the target nucleic acid includes sequences of various T cell receptor alpha variable genes (TRAV genes), T cell receptor alpha joining genes (TRAJ genes), T cell receptor alpha constant genes (TRAC genes), T cell receptor beta variable genes (TRBV genes), T cell receptor beta diversity genes (TRBD genes), T cell receptor beta joining genes (TRBJ genes), T cell receptor beta constant genes (TRBC genes), T cell receptor gamma variable genes (TRGV genes), T cell receptor gamma joining genes (TRGJ genes), T cell receptor gamma constant genes (TRGC genes), T cell receptor delta variable genes (TRDV genes), T cell receptor delta diversity genes (TRDD genes), T cell receptor delta joining genes (TRDJ genes), or T cell receptor delta constant genes (TRDC genes).

[0188] In embodiments, the target nucleic acid molecule includes a gene sequence, or a fragment thereof. In embodiments, a portion of the entire gene sequence is targeted with one or more of the probes described herein. In embodiments, the target nucleic acid molecule includes a sequence capable of encoding a protein (e.g., a protein imbued with biological function after transcribing and/or translating the nucleic acid sequence).

[0189] In embodiments, the target nucleic acid molecule includes an NEUROG3, PYY, MUC2, BEST4, INS, RBP2, MLN, FABP1, SST, OLFM4, FGB, GIP, CCL20, SH2D6, DEFA5, POU2F3, LGR5, CLU, NEUROD1, PHGR1, CCK, BEST2, GRHL1, CKB, NTS, CPB1, CEACAM1, SYTL2, ITLN1, RUNX1, GREM1, WNT5B, CDX2, TPH1, MUC1, MKI67, CDC25C, GREM2, SLC7A5, THBS1, KLF1, REG4, NOVA1, IL18R1, WNT2B, GPX2, CENPK, PAX2, POU2AF1, KRT20, CYP2A6, ACSS3, CNTNAP2, CTNNA2, CTNNB1, CHRM2, RGMB, SMOC2, TICRR, GUCA2A, SCGN, CLCA4, HNF4A, ZNF800, APC, CDH19, CLCA1, JAK3, CLDN1, CDH1, CHGA, CA7, SLC3A2, EPCAM, ANO1, HOTAIR, CLDN3, SLC6A19, CLDN4, IER3, REG1A, TOP2A, ST14, CA2, FAM210B, PLAT, ELF3, SLC16A1, POLD2, CEACAM5, EPHB3, S100P, DSP, LYZ, MUC12, GPRC5A, TFF3, MUC6, TSPAN8, AQP3, RRM2, PYGB, MUC5B, CAMK2N1, DDIT4, TCF7, ODC1, PON2, SPINK4, PROM1, ANXA1, ANXA13, BRAF, FZD7, IGFBP7, MYC, NONO, PLXND1, PROX1, ROBO1, ROBO2, SETD5, SKA3, or TP53 gene sequence.

[0190] In embodiments, the nucleic acid molecule includes a gene sequence selected from the group consisting of ACKR1, ACKR4, ACSS3, ACTA2, ADIPOQ, ANGPT2, ANKRD29, ANO1, ANXA1, ANXA13, APC, AQP1, AQP3, BEST2, BEST4, BRAF, CA2, CA7, CAMK2N1, CAVIN2, CCK, CCL2, CCL20, CCL3, CCL4, CCL5, CCR2, CCR5, CCR7, CD14, CD163, CD19, CD1C, CD2, CD247, CD27, CD274, CD276, CD28, CD33, CD34, CD36, CD38, CD3D, CD3E, CD4, CD40, CD40LG, CD44, CD47, CD68, CD70, CD74, CD79A, CD80, CD86, CD8A, CDC25C, CDH1, CDH19, CDX2, CEACAM1, CEACAM5, CEACAM8, CENPK, CHGA, CHRM2, CKB, CLCA1, CLCA4, CLDN1, CLDN3, CLDN4, CLEC9A, CLU, CNTNAP2, COL1A1, CPB1, CSF1R, CSPG4, CTLA4, CTNNA2, CTNNB1, CTSS, CX3CL1, CX3CR1, CXCL10, CXCL11, CXCL13, CXCL9, CXCR3, CXCR4, CXCR5, CXCR6, CYP1A1, CYP2A6, DDIT4, DEFA5, DES, DGKG, DPT, DSP, EGFR, ELF3, EOMES, EPCAM, EPHB3, ERBB2, ESM1, FABP1, FAM210B, FAP, FAS, FASN, FBLN1, FBN1, FCAR, FCGR1A, FCGR3A, FGB, FGFR4, FN1, FOXP3, FSCN1, FZD7, GATA3, GATM, GIP, GNLY, GPC1, GPR183, GPRC5A, GPX2, GREM1, GREM2, GRHL1, GUCA2A, GZMA, GZMB, GZMH, GZMK, HAVCR2, HLA-A, HLA-DRA, HNF4A, HOXD8, ICOSLG, ID2, IDO1, IER3, IFNG, IGFBP7, IGHA1, IGHD, IGHG1, IGHM, IL10, IL10RA, IL17A, IL18R1, IL1B, IL2RA, IL2RB, IL6, IL7R, INS, IRF1, ITGAM, ITGAX, ITGB2, ITLN1, JAK3, JCHAIN, KDR, KIT, KLF1, KLRB1, KLRD1, KLRF1, KLRK1, KRAS, KRT20, LAG3, LAMC3, LARS1, LGR5, LPL, LTBP2, LUM, LYVE1, LYZ, MADCAM1, MAPK1, MET, MKI67, MLN, MMP1, MMRN1, MMRN2, MRC1, MS4A1, MUC1, MUC12, MUC2, MUC5B, MUC6, MYC, MYH11, NCAM1, NCR1, NEUROD1, NEUROG3, NKG7, NONO, NOVA1, NRXN1, NTS, ODC1, OLFM4, PAX2, PDCD1, PDCD1LG2, PDE4A, PDGFRA, PDGFRB, PDK4, PECAMI, PHGR1, PIM1, PLAT, PLIN1, PLXND1, POLD2, POLR2A, PON2, POSTN, POU2AF1, POU2F3, PPARG, PRDM1, PRF1, PROM1, PROX1, PTGS2, PYGB, PYY, RARRES1, RBP2, REG1A, REG4, RGMB, RGS5, ROBO1, ROBO2, RRM2, RSPO3, RUNX1, S100A9, S100P, SCGN, SDC1, SELE, SELL, SETD5, SH2D6, SKA3, SLC16A1, SLC2A1, SLC3A2, SLC6A19, SLC7A5, SMOC2, SNCA, SNCG, SOX10, SPINK4, SST, ST14, STAT1, STAT3, STAT4, STC1, SYTL2, TAGLN, TAP1, TAP2, TBX21, TCF7, TCL1A, TFF3, TFP1, TGFB1, THBS1, THY1, TICRR, TIGIT, TLR2, TLR4, TLR9, TNF, TNFRSF17, TNFRSF4, TNFRSF9, TNFSF13B, TNFSF9, TOP2A, TP53, TPH1, TSPAN8, VCAM1, VCAN, VEGFA, VIM, VWF, WARS1, WNT2B, WNT5B, and ZNF800. In embodiments, the nucleic acid molecule includes a gene sequence selected from the group consisting of TNF, IL1B, IL6, IL17A, IL10, IL10RA, IL23R, IFNG, CXCL9, CXCL10, CXCL11, CXCR3, CCR7, CD3E, CD4, CD8A, FOXP3, CD68, MS4A1, ICOSLG, MUC2, CLDN1, EPCAM, CEACAM5, KRT20, COL1A1, TGFB1, and VCAM1.

[0191] RNA, including mRNA, is highly susceptible to degradation upon exposure to one or more RNAses. RNAses are present in a wide range of locations, including water, many reagents, laboratory equipment and surfaces, skin, and mucous membranes. Working with RNA often requires preparing an RNAse-free environment and materials, as well as taking precautions to avoid introducing RNAses into an RNAse-free environment. These precautions include, but are not limited to, cleaning surfaces with an RNAse cleaning product (e.g., RNASEZAP™ and other commercially available products or 0.5% sodium dodecyl sulfate [SDS] followed by 3% H₂O₂); using a designated workspace, materials, and equipment (e.g., pipets, pipet tips); using barrier tips; baking designated glassware (e.g., 300° C. for 2 hours) prior to use; treating enzymes, reagents, and other solutions (e.g., with diethyl pyrocarbonate [DEPC] or dimethyl pyrocarbonate [DMPC]) or using commercially available, certified RNAse-free water or solutions, or ultrafiltered water (e.g., for Tris-based solutions); including an RNAse inhibitor while avoiding temperatures or denaturing conditions that could deactivate the inhibitor); and wearing clean gloves (while avoiding contaminated surfaces) and a clean lab coat.

[0192] In embodiments, the cell is an immune cell. In embodiments, the immune cell is a granulocyte, a mast cell, a monocyte, a neutrophil, a dendritic cell, or a natural killer (NK) cell. In embodiments, the immune cell is an adaptive cell, such as a T cell, NK cell, or a B cell. In embodiments, the cell includes a T cell receptor gene sequence, a B cell receptor gene sequence, or an immunoglobulin gene sequence. In embodiments, the immune cell is a granulocyte. In embodiments, the immune cell is a mast cell. In embodiments, the immune cell is a monocyte. In embodiments, the immune cell is a neutrophil. In embodiments, the immune cell is a dendritic cell. In embodiments, the immune cell is a natural killer (NK) cell. In embodiments, the immune cell is a T cell. In embodiments, the immune cell is a B cell. In embodiments, the cell includes a T cell receptor gene sequence. In embodiments, the cell includes a B cell receptor gene sequence. In embodiments, the cell includes an immunoglobulin gene sequence. In embodiments, the plurality of target nucleic acids includes non-contiguous regions of a nucleic acid molecule. In embodiments, the non-contiguous regions include regions of a VDJ recombination of a B cell or T cell. In embodiments, the cell is an adherent cell (e.g., epithelial cell, endothelial cell, or neural cell). Adherent cells are usually derived from tissues of organs and attach to a substrate (e.g., epithelial cells adhere to an extracellular matrix coated substrate via transmembrane adhesion protein complexes). Adherent cells typically require a substrate, e.g., tissue culture plastic, which may be coated with extracellular matrix (e.g., collagen and laminin) components to increase adhesion properties and provide other signals needed for growth and differentiation. In embodiments, the cell is a neuronal cell, an endothelial cell, epithelial cell, germ cell, plasma cell, a muscle cell, peripheral blood mononuclear cell (PBMC), a myocardial cell, or a retina cell. In embodiments, the cell is a suspension cell (e.g., a cell free-floating in the culture medium, such a lymphoblast or hepatocyte). In embodiments, the cell is a glial cell (e.g., astrocyte, radial glia), pericyte, or stem cell (e.g., a neural stem cell). In embodiments, the cell is a neuronal cell. In embodiments, the cell is an endothelial cell. In embodiments, the cell is an epithelial cell. In embodiments, the cell is a germ cell. In embodiments, the cell is a plasma cell. In embodiments, the cell is a muscle cell. In embodiments, the cell is a peripheral blood mononuclear cell (PBMC). In embodiments, the cell is a myocardial cell. In embodiments, the cell is a retina cell. In embodiments, the cell is a lymphoblast. In embodiments, the cell is a hepatocyte. In embodiments, the cell is a glial cell. In embodiments, the cell is an astrocyte. In embodiments, the cell is a radial glia. In embodiments, the cell is a pericyte. In embodiments, the cell is a stem cell. In embodiments, the cell is a neural stem cell. In embodiments, the cell is a cancer cell.

[0193] In embodiments, the cancer cell includes a cancer-associated gene (e.g., an oncogene associated with kinases and genes involved in DNA repair) or a cancer-associated biomarker. A “biomarker” is a substance that is associated with a particular characteristic, such as a disease or condition. A change in the levels of a biomarker may correlate with the risk or progression of a disease or with the susceptibility of the disease to a given treatment. In embodiments, the cancer is Acute Myeloid Leukemia, Adrenocortical Carcinoma, Bladder Urothelial Carcinoma, Breast Ductal Carcinoma, Breast Lobular Carcinoma, Cervical Carcinoma, Cholangiocarcinoma, Colorectal Adenocarcinoma, Esophageal Carcinoma, Gastric Adenocarcinoma, Glioblastoma Multiforme, Head and Neck Squamous Cell Carcinoma, Hepatocellular Carcinoma, Kidney Chromophobe Carcinoma, Kidney Clear Cell Carcinoma, Kidney Papillary Cell Carcinoma, Lower Grade Glioma, Lung Adenocarcinoma, Lung Squamous Cell Carcinoma, Mesothelioma, Ovarian Serous Adenocarcinoma, Pancreatic Ductal Adenocarcinoma, Paraganglioma & Pheochromocytoma, Prostate Adenocarcinoma, Sarcoma, Skin Cutaneous Melanoma, Testicular Germ Cell Cancer, Thymoma, Thyroid Papillary Carcinoma, Uterine Carcinosarcoma, Uterine Corpus Endometrioid Carcinoma, or Uveal Melanoma. In embodiments, the cancer-associated gene is a nucleic acid sequence identified within The Cancer Genome Atlas Program.

[0194] In embodiments, the cell is a cell (e.g., a T cell) within a tumor. In embodiments, the cell is a non-allogenic cell (i.e., native cell to the subject) within a tumor. In embodiments, the cell is a tumor infiltrating lymphocyte (TIL). In embodiments, the cell is an allogenic cell. In embodiments, the cell is a circulating tumor cell.

[0195] In embodiments, the cell in situ is obtained from a subject (e.g., human or animal tissue). Once obtained, the cell is placed in an artificial environment in plastic or glass containers supported with specialized medium containing essential nutrients and growth factors to support proliferation. In embodiments, the cell is permeabilized and immobilized to a solid support surface. In embodiments, the cell is permeabilized and immobilized to an array (i.e., to discrete locations arranged in an array). In embodiments, the cell is immobilized to a solid support surface. In embodiments, the surface includes a patterned surface (e.g., suitable for immobilization of a plurality of cells in an ordered pattern. The discrete regions of the ordered pattern may have defined locations in a regular array, which may correspond to a rectilinear pattern, circular pattern, hexagonal pattern, or the like. These discrete regions are separated by interstitial regions. As used herein, the term “interstitial region” refers to an area in a substrate or on a surface that separates other areas of the substrate or surface. In embodiments, a plurality of cells are immobilized on a patterned surface that have a mean or median separation from one another of about 10-20 μm. In embodiments, a plurality of cells are immobilized on a patterned surface that have a mean or median separation from one another of about 10-20; 10-50; or 100 μm. In embodiments, a plurality of cells are arrayed on a substrate. In embodiments, a plurality of cells are immobilized in a 96-well microplate having a mean or median well-to-well spacing of about 8 mm to about 12 mm (e.g., about 9 mm). In embodiments, a plurality of cells are immobilized in a 384-well microplate having a mean or median well-to-well spacing of about 3 mm to about 6 mm (e.g., about 4.5 mm).

[0196] In embodiments, the method includes immobilizing a plurality of tissue sections to the solid support (e.g., a flow cell), wherein a tissue in a plurality of tissue sections includes the biomolecule to be detected. In embodiments, the method includes immobilizing 24 tissue sections (10 mm×17 mm sections). In embodiments, the method includes immobilizing 40 tissue sections (10 mm×10 mm sections). In embodiments, the method includes immobilizing 128 tissue sections (4 mm×4 mm sections).

[0197] The cell or tissue may be manipulated prior to immobilizing the cell or tissue onto a solid support using known techniques in the art (see, e.g., PCT Publication WO2023076832A1). In embodiments, the method further includes cutting a sample portion from the biological sample (e.g., including cells or tissues) using a punch device such that the punch device contains the sample portion; mounting the punch device containing the sample portion onto the first solid support as described herein (e.g., inverting the punch device); pushing the sample portion out of the punch device using a piston, so that all or a portion thereof of the sample portion is positioned on the first solid support as described herein. In embodiments, the method further includes cutting a sample portion from the biological sample using two or more punch devices such that each punch device contains a different the sample portion; mounting each punch device containing the sample portion onto the first solid support as described herein; pushing the sample portions out of the punch devices using one or more pistons so that the sample portions are positioned onto the solid support as described herein (e.g., a flow cell described herein).

[0198] In embodiments, the cell is attached to the substrate via a bioconjugate reactive linker. In embodiments, the cell is attached to the substrate via a specific binding reagent. In embodiments, the specific binding reagent includes an antibody, single-chain Fv fragment (scFv), antibody fragment-antigen binding (Fab), or an aptamer. In embodiments, the specific binding reagent includes an antibody, or antigen binding fragment, an aptamer, affimer, or non-immunoglobulin scaffold. In embodiments, the specific binding reagent is a peptide, a cell penetrating peptide, an aptamer, a DNA aptamer, an RNA aptamer, an antibody, an antibody fragment, a light chain antibody fragment, a single-chain variable fragment (scFv), a lipid, a lipid derivative, a phospholipid, a fatty acid, a triglyceride, a glycerolipid, a glycerophospholipid, a sphingolipid, a saccharolipid, a polyketide, a polylysine, polyethyleneimine, diethylaminoethyl (DEAE)-dextran, cholesterol, or a sterol moiety. Substrates may be prepared for selective capture of particular cells. For example, a substrate containing a plurality of bioconjugate reactive moieties or a plurality of specific binding reagents, optionally in an ordered pattern, contacts a plurality of cells. Only cells containing complementary bioconjugate reactive moieties or complementary specific binding reagents are capable of reacting, and thus adhering, to the substrate.

[0199] In embodiments, the methods are performed in situ on isolated cells or in tissue sections that have been prepared according to methodologies known in the art. Methods for permeabilization and fixation of cells and tissue samples are known in the art, as exemplified by Cremer et al., The Nucleus: Volume 1: Nuclei and Subnuclear Components, R. Hancock (ed.) 2008; and Larsson et al., Nat. Methods (2010) 7:395-397, the content of each of which is incorporated herein by reference in its entirety. In embodiments, the cell is cleared (e.g., digested) of proteins, lipids, or proteins and lipids.

[0200] In embodiments, the cell is immobilized to a substrate. The cell may have been cultured on the surface, or the cell may have been initially cultured in suspension and then fixed to the surface. Substrates can be two- or three-dimensional and can include a planar surface (e.g., a glass slide). A substrate can include glass (e.g., controlled pore glass (CPG)), quartz, plastic (such as polystyrene (low cross-linked and high cross-linked polystyrene), polycarbonate, polypropylene and poly(methymethacrylate)), acrylic copolymer, polyamide, silicon, metal (e.g., alkanethiolate-derivatized gold), cellulose, nylon, latex, dextran, gel matrix (e.g., silica gel), polyacrolein, or composites. In embodiments, the substrate includes a polymeric coating, optionally containing bioconjugate reactive moieties capable of affixing the sample. Suitable three-dimensional substrates include, for example, spheres, microparticles, beads, membranes, slides, plates, micromachined chips, tubes (e.g., capillary tubes), microwells, microfluidic devices, channels, filters, or any other structure suitable for anchoring a sample. In embodiments, the substrate is not a flow cell. In embodiments, the substrate includes a polymer matrix material (e.g., polyacrylamide, cellulose, alginate, polyamide, cross-linked agarose, cross-linked dextran or cross-linked polyethylene glycol), which may be referred to herein as a “matrix”, “synthetic matrix”, “exogenous polymer” or “exogenous hydrogel”. In embodiments, a matrix may refer to the various components and organelles of a cell, for example, the cytoskeleton (e.g., actin and tubulin), endoplasmic reticulum, Golgi apparatus, vesicles, etc. In embodiments, the matrix is endogenous to a cell. In embodiments, the matrix is exogenous to a cell. In embodiments, the matrix includes both the intracellular and extracellular components of a cell. In embodiments, polynucleotide primers may be immobilized on a matrix including the various components and organelles of a cell. Immobilization of polynucleotide primers on a matrix of cellular components and organelles of a cell is accomplished as described herein, for example, through the interaction/reaction of complementary bioconjugate reactive moieties. In embodiments, the exogenous polymer may be a matrix or a network of extracellular components that act as a point of attachment (e.g., act as an anchor) for the cell to a substrate.”

[0201] In embodiments, the cell is exposed to paraformaldehyde (i.e., by contacting the cell with paraformaldehyde). Any suitable permeabilization and fixation technologies can be used for making the cell available for the detection methods provided herein. In embodiments the method includes affixing single cells or tissues to a transparent substrate. Exemplary tissue include those from skin tissue, muscle tissue, bone tissue, organ tissue and the like. In embodiments, the method includes immobilizing the cell in situ to a substrate and permeabilized for delivering probes, enzymes, nucleotides and other components required in the reactions. In embodiments, the cell includes many cells from a tissue section in which the original spatial relationships of the cells are retained. In embodiments, the cell in situ is within a Formalin-Fixed Paraffin-Embedded (FFPE) sample. In embodiments, the cell is subjected to paraffin removal methods, such as methods involving incubation with a hydrocarbon solvent, such as xylene or hexane, followed by two or more washes with decreasing concentrations of an alcohol, such as ethanol. The cell may be rehydrated in a buffer, such as PBS, TBS or MOPs. In embodiments, the FFPE sample is incubated with xylene and washed using ethanol to remove the embedding wax, followed by treatment with Proteinase K to permeabilized the tissue. In embodiments, the cell is fixed with a chemical fixing agent. In embodiments, the chemical fixing agent is formaldehyde or glutaraldehyde. In embodiments, the chemical fixing agent is glyoxal or dioxolane. In embodiments, the chemical fixing agent includes one or more of ethanol, methanol, 2-propanol, acetone, and glyoxal. In embodiments, the chemical fixing agent includes formalin, Greenfix®, Greenfix® Plus, UPM, CyMol®, HOPE®, CytoSkelFix™, F-Solv®, FineFIX®, RCL2/KINFix, UMFIX, Glyo-Fixx®, Histochoice®, or PAXgene®. In embodiments, the cell is fixed within a synthetic three-dimensional matrix (e.g., polymeric material). In embodiments, the synthetic matrix includes polymeric-crosslinking material. In embodiments, the material includes polyacrylamide, poly-ethylene glycol (PEG), poly(acrylate-co-acrylic acid) (PAA), or Poly(N-isopropylacrylamide) (NIPAM).

[0202] In embodiments, the oligonucleotide primer (alternatively referred to as a polynucleotide probe, or padlock probe) is a single-stranded polynucleotide having at least one primer binding sequence. In embodiments, the oligonucleotide primer includes at least one amplification primer binding sequence and at least one sequencing primer binding sequence. In embodiments, the oligonucleotide primer includes at least two primer binding sequences. In embodiments, the oligonucleotide primer includes an amplification primer binding sequence. In embodiments, the oligonucleotide primer includes a sequencing primer binding sequence. The amplification primer binding sequence refers to a nucleotide sequence that is complementary to a primer useful in initiating amplification (i.e., an amplification primer). Likewise, a sequencing primer binding sequence is a nucleotide sequence that is complementary to a primer useful in initiating sequencing (i.e., a sequencing primer). Primer binding sequences usually have a length in the range of between 3 to 36 nucleotides, also 5 to 24 nucleotides, also from 14 to 36 nucleotides. In embodiments, the oligonucleotide primer does not include a barcode. In embodiments, an amplification primer and a sequencing primer are complementary to the same primer binding sequence, or overlapping primer binding sequences. In embodiments, an amplification primer and a sequencing primer are complementary to different primer binding sequences. In embodiments, the primer binding sequence is complementary to a fluorescent in situ hybridization (FISH) probe. FISH probes may be custom designed using known techniques in the art, see for example Gelali, E., Girelli, G., Matsumoto, M. et al. Nat Commun 10, 1636 (2019).

[0203] In embodiments, the oligonucleotide primer (alternatively referred to herein as a polynucleotide probe) is approximately 50 to 200 nucleotides. In embodiments, the oligonucleotide primer has a first domain that is capable of hybridizing to a first target sequence domain, and a second ligation domain, capable of hybridizing to a target nucleic acid sequence-adjacent second sequence domain. In embodiments, following hybridization there is a gap between the first target sequence domain, and the second ligation domain, wherein the gap spans the length of the target nucleic acid sequence. In embodiments, the oligonucleotide primer has a first domain that is capable of hybridizing to a first target sequence domain, and a second domain capable of hybridizing to a second target sequence domain. In embodiments, the length of the first domain and second domain are the same length (e.g., both the first and the second domains are about 15 nucleotides). In embodiments, the length of the first domain and second domain are different lengths (e.g., the first domain is about 10 nucleotides and the second domain is about 20 nucleotides). In embodiments, an asymmetric oligonucleotide primer (i.e., an oligonucleotide primer having a first domain and second domain that are different sequence lengths) may be advantageous in preventing non-specific hybridization. In embodiments, the total length of the first domain and second domain is about 25, 30, 35, or 40 nucleotides. In embodiments, the total length of the first domain and second domain is about 30 nucleotides. In embodiments, the total length of the first domain and second domain is about 15 to 25 nucleotides. In embodiments, the total length of the first domain is about 15 to 25 nucleotides and the total length of the second domain is about 20 to 25 nucleotides. In embodiments, the oligonucleotide primer includes at least one target-specific region. In embodiments, the oligonucleotide primer includes two target-specific regions. In embodiments, the oligonucleotide primer includes at least one flanking-target region (i.e., an oligonucleotide sequence that flanks the region of interest). In embodiments, the oligonucleotide primer includes two flanking-target regions. A target-specific region is a single stranded polynucleotide that is at least 50% complementary, at least 75% complementary, at least 85% complementary, at least 90% complementary, at least 95% complementary, at least 98%, at least 99% complementary, or 100% complementary to a portion of a nucleic acid molecule that includes a target sequence (e.g., a gene of interest). In embodiments, the target-specific region is capable of hybridizing to at least a portion of the target sequence. In embodiments, the target-specific region is substantially non-complementary to other target sequences present in the sample.

[0204] In embodiments, each oligonucleotide (e.g., one or more oligonucleotides of a plurality of oligonucleotides) includes locked nucleic acids (LNAs), Bis-locked nucleic acids (bisLNAs), twisted intercalating nucleic acids (TINAs), bridged nucleic acids (BNAs), 2′-O-methyl RNA:DNA chimeric nucleic acids, minor groove binder (MGB) nucleic acids, morpholino nucleic acids, C5-modified pyrimidine nucleic acids, peptide nucleic acids (PNAs), or combinations thereof. In embodiments, the first oligonucleotide, the second oligonucleotide, and/or the circularizable oligonucleotide includes locked nucleic acids (LNAs), Bis-locked nucleic acids (bisLNAs), twisted intercalating nucleic acids (TINAs), bridged nucleic acids (BNAs), 2′-O-methyl RNA:DNA chimeric nucleic acids, minor groove binder (MGB) nucleic acids, morpholino nucleic acids, C5-modified pyrimidine nucleic acids, peptide nucleic acids (PNAs), or combinations thereof.

[0205] In embodiments, each oligonucleotide includes one or more locked nucleic acid (LNA) nucleotides. In embodiments, the target hybridization sequence of each oligonucleotide includes one or more LNA nucleotides. In embodiments, the first hybridization sequence and/or the second hybridization sequence of each oligonucleotide includes one or more LNA nucleotides. In embodiments, the first target hybridization sequence of the first oligonucleotide and/or the second target hybridization sequence of the second oligonucleotide include one or more LNA nucleotides. In embodiments, the sequence complementary to the first hybridization sequence and/or the second sequence complementary to the second hybridization sequence of the circularizable oligonucleotide includes one or more LNA nucleotides. In embodiments, the oligonucleotide includes 1, 2, 3, 4, 5, 6, 7, 8, 9, or 10 LNAs.

[0206] In embodiments, the target hybridization sequence of the oligonucleotide includes a plurality of LNAs interspersed throughout the target hybridization sequence. In embodiments, the hybridization sequence (or complement thereof) of the oligonucleotide and/or circularizable oligonucleotide includes a plurality of LNAs interspersed throughout the hybridization sequence, or complement thereof.

[0207] In embodiments, the target hybridization sequence and/or hybridization sequence (e.g., the first hybridization sequence, the second hybridization sequence, and/or the third hybridization sequence) includes Bis-locked nucleic acids (bisLNAs). In embodiments, the target hybridization sequence and/or hybridization sequence includes twisted intercalating nucleic acids (TINAs). In embodiments, the target hybridization sequence and/or hybridization sequence includes bridged nucleic acids (BNAs). In embodiments, the target hybridization sequence and/or hybridization sequence includes 2′-O-methyl RNA:DNA chimeric nucleic acids. In embodiments, the target hybridization sequence and/or hybridization sequence includes minor groove binder (MGB) nucleic acids. In embodiments, the target hybridization sequence and/or hybridization sequence includes morpholino nucleic acids. Morpholino nucleic acids are synthetic nucleotides that have standard nucleic acid bases (e.g., adenine, guanine, cytosine, and thymine) wherein those bases are bound to methylenemorpholine rings linked through phosphorodiamidate groups instead of phosphates. Morpholino nucleic acids may be referred to as phosphorodiamidate morpholino oligomers (PMOs). In embodiments, the target hybridization sequence and/or hybridization sequence includes C5-modified pyrimidine nucleic acids. In embodiments, the target hybridization sequence and/or hybridization sequence includes peptide nucleic acids (PNAs). In embodiments, the target hybridization sequence and/or hybridization sequence includes from 5′ to 3′ a plurality of synthetic nucleotides (e.g., LNAs) followed by a plurality (e.g., 2 to 5) canonical or native nucleotides (e.g., dNTPs). In embodiments, the target hybridization sequence and/or hybridization sequence includes one or more (e.g., 2 to 5) deoxyuracil nucleobases (dU). In embodiments, the one or more dU nucleobases are at or near the 3′ end of the target hybridization sequence and/or hybridization sequence (e.g., within 5 nucleotides of the 3′ end). In embodiments, the target hybridization sequence and/or hybridization sequence includes from 5′ to 3′ a plurality (e.g., 2 to 5) of phosphorothioate nucleic acids, followed by a plurality of synthetic nucleotides (e.g., LNAs), and subsequently followed by a plurality (e.g., 2 to 5) of canonical nucleobases. In some embodiments, the target hybridization sequence and/or hybridization sequence includes a plurality of canonical nucleobases, wherein the canonical nucleobases terminate (i.e., at the 3′ end) with a deoxyuracil nucleobase (dU).

[0208] In embodiments, the target hybridization sequence and/or hybridization sequence (e.g., the first hybridization sequence, the second hybridization sequence, and/or the third hybridization sequence) includes a plurality of LNAs interspersed throughout the polynucleotide. In embodiments, the target hybridization sequence and/or hybridization sequence includes a plurality of consecutive LNAs (e.g., 2 to 5 LNAs, 5 to 7 LNAs, or 7 to 10 LNAs) throughout the target hybridization sequence and/or hybridization sequence. In embodiments, the entire composition of the target hybridization sequence and/or hybridization sequence includes less than 70%, less than 60%, less than 50%, less than 40%, less than 30%, less than 20%, less than 10%, or less than 5% of LNAs. In embodiments, the entire composition of the target hybridization sequence and/or hybridization sequence includes up to about 70%, up to about 60%, up to about 50%, up to about 40%, up to about 30%, up to about 20%, up to about 10%, or up to about 5% of LNAs. In embodiments, the entire composition of the target hybridization sequence and/or hybridization sequence includes more than 60%, more than 50%, more than 40%, more than 30%, more than 20%, more than 10%, or more than 5% of LNAs. In embodiments, the entire composition of the target hybridization sequence and/or hybridization sequence includes about 5% to about 10%, about 10% to about 20%, about 20% to about 30%, about 30% to about 40%, about 40% to about 50%, about 50% to about 60%, or about 60% to about 70% of LNAs. In embodiments, the entire composition of the target hybridization sequence and/or hybridization sequence includes about 5%, about 10%, about 15%, about 20%, about 25%, about 30%, about 35%, about 40%, about 45%, about 50%, about 55%, about 60%, about 65%, or about 70% of LNAs. In embodiments, the entire composition of the target hybridization sequence and/or hybridization sequence includes about 30%, about 35%, about 40%, about 45%, about 50%, about 55%, about 60%, about 65%, about 70%, about 75%, about 80%, about 85%, about 90%, or about 95% of canonical dNTPs. In embodiments, the entire composition of the target hybridization sequence and/or hybridization sequence includes less than 95%, less than 90%, less than 80%, less than 70%, less than 60%, less than 50%, less than 40%, or less than 30% of canonical dNTPs. In embodiments, the entire composition of the target hybridization sequence and/or hybridization sequence includes up to about 95%, up to about 90%, up to about 80%, up to about 70%, up to about 60%, up to about 50%, up to about 40%, or up to about 30% of canonical dNTPs. In embodiments, the entire composition of the target hybridization sequence and/or hybridization sequence includes more than 90%, more than 80%, more than 70%, more than 60%, more than 50%, more than 40%, or more than 30% of canonical dNTPs.

[0209] Padlock probes are specialized ligation probes, examples of which are known in the art, see for example Nilsson M, et al. Science. 1994; 265(5181):2085-2088), and has been applied to detect transcribed RNA in cells, see for example Christian A T, et al. Proc Natl Acad Sci USA. 2001; 98(25):14238-14243, both of which are incorporated herein by reference in their entireties. In embodiments, the padlock probe is approximately 50 to 200 nucleotides. In embodiments, a padlock probe has a first domain that is capable of hybridizing to a first target sequence domain, and a second ligation domain, capable of hybridizing to an adjacent second sequence domain. The configuration of the padlock probe is such that upon ligation of the first and second ligation domains of the padlock probe, the probe forms a circular polynucleotide, and forms a complex with the sequence (i.e., the sequence it hybridized to, the target sequence) wherein the target sequence is “inserted” into the loop of the circle. Padlock probes are useful for the methods provided herein and include, for example, padlock probes for genomic analyses, as exemplified by Gore, A. et al. Nature 471, 63-67 (2011); Porreca, G. J. et al. Nat Methods 4, 931-936 (2007); Li, J. B. et al. Genome Res 19, 1606-1615 (2009), Zhang, K. et al. Nat Methods 6, 613-618 (2009); Noggle, S. et al. Nature 478, 70-75 (2011); and Li, J. B. et al. Science 324, 1210-1213 (2009), the content of each of which is incorporated by reference in its entirety.

[0210] In embodiments, the padlock probe includes at least one target-specific region. A target-specific region is a single stranded polynucleotide that is at least 50% complementary, at least 75% complementary, at least 85% complementary, at least 90% complementary, at least 95% complementary, at least 98%, at least 99% complementary, or 100% complementary to a portion of a nucleic acid molecule that includes a target sequence (e.g., a gene of interest). In embodiments, the target-specific region is capable of hybridizing to at least a portion of the target sequence. In embodiments, the target-specific region is substantially non-complementary to other target sequences present in the sample. In embodiments, the padlock probe includes at two target-specific regions.

[0211] In embodiments, the padlock probe has a first domain that is capable of hybridizing to a first target sequence domain, and a second domain capable of hybridizing to an adjacent second target sequence domain. In embodiments, the length of the first domain and second domain are the same length (e.g., both the first and the second domains are about 15 nucleotides). In embodiments, the length of the first domain and second domain are different lengths (e.g., the first domain is about 10 nucleotides and the second domain is about 20 nucleotides). In embodiments, an asymmetric padlock probe (i.e., a padlock probe having a first domain and second domain that are different lengths) may be advantageous in preventing non-specific hybridization. In embodiments, the total length of the first domain and second domain is about 25, 30, 35, or 40 nucleotides. In embodiments, the total length of the first domain and second domain is about 30 nucleotides.

[0212] In embodiments, the method includes hybridizing a padlock probe to two adjacent nucleic acid sequences (i.e., no gap) of the target nucleic acid molecule, wherein the padlock probe is a single-stranded polynucleotide having a 5′ and a 3′ end. In embodiments, the target nucleic acid serves as a splint for the padlock probe. In embodiments, the method includes hybridizing a padlock probe to two nucleic acid sequences of the target nucleic acid molecule separated by a target sequence, wherein the padlock probe is a single-stranded polynucleotide having a 5′ and a 3′ end. In embodiments, the target nucleic acid serves as a splint for the padlock probe.

[0213] In embodiments, circularizing the oligonucleotide primer to generate a circular oligonucleotide includes extending the 3′ end of the oligonucleotide primer (e.g., extending the 3′ end of the primer using a polymerase (e.g., a Thermus thermophilus (Tth) DNA polymerase) to incorporate one or more nucleotides) along the target nucleic acid to generate a complementary sequence (e.g., complementary to the target nucleic acid, for example a target RNA sequence), and ligating the complementary sequence to the 5′ end of the oligonucleotide primer. In embodiments, the ligation includes enzymatic ligation. In embodiments, ligating includes enzymatic ligation including a ligation enzyme (e.g., Circligase enzyme, Taq DNA Ligase, HiFi Taq DNA Ligase, T4 ligase, PBCV-1 DNA Ligase (also known as SplintR ligase) or Ampligase DNA Ligase). Non-limiting examples of ligases include DNA ligases such as DNA Ligase I, DNA Ligase II, DNA Ligase III, DNA Ligase IV, T4 DNA ligase, T7 DNA ligase, T3 DNA Ligase, E. coli DNA Ligase, PBCV-1 DNA Ligase (also known as SplintR ligase) or a Taq DNA Ligase. In embodiments, the ligase enzyme includes a T4 DNA ligase, T4 RNA ligase 1, T4 RNA ligase 2, T3 DNA ligase or T7 DNA ligase. In embodiments, the enzymatic ligation is performed by a mixture of ligases. In embodiments, the ligation enzyme is selected from the group consisting of T4 DNA ligase, T4 RNA ligase 1, T4 RNA ligase 2, RtcB ligase, T3 DNA ligase, T7 DNA ligase, Taq DNA ligase, PBCV-1 DNA Ligase, a thermostable DNA ligase (e.g., 5′AppDNA/RNA ligase), an ATP dependent DNA ligase, an RNA-dependent DNA ligase (e.g., SplintR ligase), and combinations thereof.

[0214] In embodiments, the method further includes an amplification method for amplifying the circular polynucleotide. In embodiments, the method further includes amplifying the circular polynucleotide by extending an amplification primer with a polymerase (e.g., a strand-displacing polymerase), wherein the primer extension generates an extension product including multiple complements of the circular polynucleotide, referred to as an amplicon. An amplicon typically contains multiple, tandem copies of the circularized nucleic acid molecule of the corresponding sample nucleic acid. The number of copies can be varied by appropriate modification of the reaction conditions, such as varying the number of amplification cycles, using polymerases of varying processivity in the amplification reaction, or varying the length of time that the amplification reaction is run. In embodiments, the circular polynucleotide is copied about 5-50 times (i.e., the extension product includes about 5 to 50 complements of the circular polynucleotide). In embodiments, the circular polynucleotide is copied about 100-300 times (i.e., the extension product includes about 100 to 300 complements of the circular polynucleotide). In embodiments, the method includes hybridizing an amplification primer and oligonucleotide primer in the same reaction (e.g., simultaneously). In embodiments, the method includes contacting the target with an amplification primer and oligonucleotide primer in the same reaction (e.g., simultaneously).

[0215] In embodiments, the amplifying includes rolling circle amplification (RCA) or rolling circle transcription (RCT) (see, e.g., Lizardi et al., Nat. Genet. 19:225-232 (1998), which is incorporated herein by reference in its entirety). Several suitable rolling circle amplification methods are known in the art. For example, RCA amplifies a circular polynucleotide (e.g., DNA) by polymerase extension of an amplification primer complementary to a portion of the template polynucleotide. This process generates copies of the circular polynucleotide template such that multiple complements of the template sequence arranged end to end in tandem are generated (i.e., a concatemer) locally preserved at the site of the circle formation. In embodiments, the amplifying occurs at isothermal conditions. In embodiments, the amplifying includes hybridization chain reaction (HCR). HCR uses a pair of complementary, kinetically trapped hairpin oligomers to propagate a chain reaction of hybridization events, as described in Dirks, R. M., & Pierce, N. A. (2004) PNAS USA, 101(43), 15275-15278, which is incorporated herein by reference for all purposes. In embodiments, the amplifying includes branched rolling circle amplification (BRCA); e.g., as described in Fan T, Mao Y, Sun Q, et al. Cancer Sci. 2018; 109:2897-2906, which is incorporated herein by reference in its entirety. In embodiments, the amplifying includes hyberbranched rolling circle amplification (HRCA). Hyperbranched RCA uses a second primer complementary to the first amplification product. This allows products to be replicated by a strand-displacement mechanism, which yields drastic amplification within an isothermal reaction (Lage et al., Genome Research 13:294-307 (2003), which is incorporated herein by reference in its entirety). In embodiments, amplifying includes polymerase extension of an amplification primer. In embodiments, the polymerase is T4, T7, Sequenase, Taq, Klenow, and Pol I DNA polymerases. SD polymerase, Bst large fragment polymerase, or a phi29 polymerase or mutant thereof. In embodiments, the strand-displacing enzyme is an SD polymerase, Bst large fragment polymerase, or a phi29 polymerase or mutant thereof. In embodiments, the strand-displacing polymerase is phi29 polymerase, phi29 mutant polymerase or a thermostable phi29 mutant polymerase. A “phi polymerase” (or “Φ29 polymerase”) is a DNA polymerase from the Φ29 phage or from one of the related phages that, like Φ29, contain a terminal protein used in the initiation of DNA replication. For example, phi29 polymerases include the B103, GA-1, PZA, Φ15, BS32, M2Y (also known as M2), Nf, G1, Cp-1, PRD1, PZE, SFS, Cp-5, Cp-7, PR4, PR5, PR722, L17, Φ21, and AV-1 DNA polymerases, as well as chimeras thereof. A phi29 mutant DNA polymerase includes one or more mutations relative to naturally-occurring wild-type phi29 DNA polymerases, for example, one or more mutations that alter interaction with and/or incorporation of nucleotide analogs, increase stability, increase read length, enhance accuracy, increase phototolerance, and/or alter another polymerase property, and can include additional alterations or modifications over the wild-type phi29 DNA polymerase, such as one or more deletions, insertions, and/or fusions of additional peptide or protein sequences.

[0216] In embodiments, amplifying the circular oligonucleotide includes incubating the circular oligonucleotide with the strand-displacing polymerase for about 1 hour to about 12 hours. In embodiments, amplifying includes incubation with the strand-displacing polymerase for about 60 seconds to about 60 minutes. In embodiments, amplifying includes incubation with the strand-displacing polymerase for about 10 minutes to about 60 minutes. In embodiments, amplifying includes incubation with the strand-displacing polymerase for about 10 minutes to about 30 minutes. In embodiments, amplifying the circular oligonucleotide includes incubating the circular oligonucleotide with the strand-displacing polymerase for about 1, about 2, about 3, about 4, about 5, about 6, about 7, about 8, about 9, about 10, about 11, or about 12 hours. In embodiments, amplifying the circular oligonucleotide includes incubating the circular oligonucleotide with the strand-displacing polymerase for more than 12 hours.

[0217] In embodiments, the extension product includes three or more copies of the target nucleic acid. In embodiments, the extension product includes at least three or more copies of the target nucleic acid. In embodiments, the extension product includes at least five or more copies of the target nucleic acid. In embodiments, the extension product includes at 5 to 10 copies of the target nucleic acid. In embodiments, the extension product includes 10 to 20 copies of the target nucleic acid. In embodiments, the extension product includes 20 to 50 copies of the target nucleic acid.

[0218] In embodiments, the method includes sequencing the extension products, which includes the target nucleic acid sequence. A variety of sequencing methodologies can be used such as sequencing-by synthesis (SBS), pyrosequencing, sequencing by ligation (SBL), or sequencing by hybridization (SBH). Pyrosequencing detects the release of inorganic pyrophosphate (PPi) as particular nucleotides are incorporated into a nascent nucleic acid strand (Ronaghi, et al., Analytical Biochemistry 242(1), 84-9 (1996); Ronaghi, Genome Res. 11(1), 3-11 (2001); Ronaghi et al. Science 281(5375), 363 (1998); U.S. Pat. Nos. 6,210,891; 6,258,568; and. 6,274,320, each of which is incorporated herein by reference in its entirety). In pyrosequencing, released PPi can be detected by being converted to adenosine triphosphate (ATP) by ATP sulfurylase, and the level of ATP generated can be detected via light produced by luciferase. In this manner, the sequencing reaction can be monitored via a luminescence detection system. In both SBL and SBH methods, target nucleic acids, and amplicons thereof, are subjected to repeated cycles of oligonucleotide delivery and detection. SBL methods, include those described in Shendure et al. Science 309:1728-1732 (2005); U.S. Pat. Nos. 5,599,675; and 5,750,341, each of which is incorporated herein by reference in its entirety; and the SBH methodologies are as described in Bains et al., Journal of Theoretical Biology 135(3), 303-7 (1988); Drmanac et al., Nature Biotechnology 16, 54-58 (1998); Fodor et al., Science 251(4995), 767-773 (1995); and WO 1989/10977, each of which is incorporated herein by reference in its entirety.

[0219] In SBS, extension of a nucleic acid primer along a nucleic acid template is monitored to determine the sequence of nucleotides in the template. The underlying chemical process can be catalyzed by a polymerase, wherein fluorescently labeled nucleotides are added to a primer (thereby extending the primer) in a template dependent fashion such that detection of the order and type of nucleotides added to the primer can be used to determine the sequence of the template. In embodiments, sequencing includes annealing and extending a sequencing primer to incorporate a detectable label that indicates the identity of a nucleotide in the target polynucleotide, detecting the detectable label, and repeating the extending and detecting of steps. In embodiments, the methods include sequencing one or more bases of a target nucleic acid by extending a sequencing primer hybridized to a target nucleic acid (e.g., an amplification product produced by the amplification methods described herein). In embodiments, sequencing may be accomplished by a sequencing-by-synthesis (SBS) process. In embodiments, sequencing includes a sequencing by synthesis process, where individual nucleotides are identified iteratively, as they are polymerized to form a growing complementary strand. In embodiments, nucleotides added to a growing complementary strand include both a label and a reversible chain terminator that prevents further extension, such that the nucleotide may be identified by the label before removing the terminator to add and identify a further nucleotide. Such reversible chain terminators include removable 3′ blocking groups, for example as described in U.S. Pat. Nos. 7,541,444 and 7,057,026. Once such a modified nucleotide has been incorporated into the growing polynucleotide chain complementary to the region of the template being sequenced, there is no free 3′-OH group available to direct further sequence extension and therefore the polymerase cannot add further nucleotides. Once the identity of the base incorporated into the growing chain has been determined, the 3′ reversible terminator may be removed to allow addition of the next successive nucleotide. By ordering the products derived using these modified nucleotides it is possible to deduce the DNA sequence of the oligonucleotide target nucleic acid sequence.

[0220] In embodiments, the methods of sequencing a nucleic acid include a extending a polynucleotide by using a polymerase. In embodiments, the polymerase is a DNA polymerase.

[0221] In embodiments, sequencing includes a plurality of sequencing cycles. In embodiments, sequencing includes 20 to 100 sequencing cycles. In embodiments, sequencing includes 50 to 100 sequencing cycles. In embodiments, sequencing includes 50 to 300 sequencing cycles. In embodiments, sequencing includes 50 to 150 sequencing cycles. In embodiments, sequencing includes at least 10, 20, 30 40, or 50 sequencing cycles. In embodiments, sequencing includes at least 10 sequencing cycles. In embodiments, sequencing includes 10 to 20 sequencing cycles. In embodiments, sequencing includes 10, 11, 12, 13, 14, or 15 sequencing cycles. In embodiments, sequencing includes (a) extending a sequencing primer by incorporating a labeled nucleotide, or labeled nucleotide analogue and (b) detecting the label to generate a signal for each incorporated nucleotide or nucleotide analogue.

[0222] In embodiments, sequencing includes sequentially extending a plurality of sequencing primers (e.g., sequencing a first region of a target nucleic acid followed by sequencing a second region of a target nucleic acid, followed by sequencing N regions, where N is the number of sequencing primers in the known sequencing primer set). In embodiments, sequencing includes generating a plurality of sequencing reads.

[0223] In embodiments, sequencing includes extending a sequencing primer to generate a sequencing read. In embodiments, sequencing includes extending a sequencing primer by incorporating a labeled nucleotide, or labeled nucleotide analogue and detecting the label to generate a signal for each incorporated nucleotide or nucleotide analogue. In embodiments, the labeled nucleotide or labeled nucleotide analogue further includes a reversible terminator moiety.

[0224] In embodiments, sequencing includes encoding the sequencing read into a codeword. Useful encoding schemes include those developed for telecommunications, coding theory and information theory such as those set forth in Hamming, Coding and Information Theory, 2^{nd} Ed. Prentice Hall, Englewood Cliffs, N.J. (1986) and Moon T K. Error Correction Coding: Mathematical Methods and Algorithms. ed. 1st Wiley: 2005, each of which are incorporated herein by reference. A useful encoding scheme uses a Hamming code. A Hamming code can provide for signal (and therefore sequencing and barcode) distinction. In this scheme, signal states detected from a series of nucleotide incorporation and detection events (i.e., while sequencing the oligonucleotide barcode) can be represented as a series of the digits to form a codeword, the codeword having a length equivalent to the number incorporation/detection events. The digits can be binary (e.g. having a value of 1 for presence of signal and a value of 0 for absence of the signal) or digits can have a higher radix (e.g., a ternary digit having a value of 1 for fluorescence at a first wavelength, a value of 2 for fluorescence at a second wavelength, and a value of 0 for no fluorescence at those wavelengths, etc.). Barcode discrimination capabilities are provided when codewords can be quantified via Hamming distances between two codewords (i.e., barcode 1 having codeword 1, and barcode 2 having codeword 2, etc.).

[0225] In embodiments, the barcode is at least 5, 6, 7, 8, 9, 10, 11, 12, 13, 14, or 15 nucleotides in length. In embodiments, the barcode is 5, 6, 7, 8, 9, 10, 11, 12, 13, 14, or 15 nucleotides in length. In embodiments, the barcode is 10 to 15 nucleotides in length. An oligonucleotide barcode is at least about 1, 2, 3, 4, 5, 6, 7, 8, 9, 10, 15, 20, 25, 30, 35, 40, 45, 50 or more nucleotides in length. An oligonucleotide barcode can be at most about 300, 200, 100, 90, 80, 70, 60, 50, 40, 30, 20, 15, 12, 10, 9, 8, 7, 6, 5, 4 or fewer or more nucleotides in length. In embodiments, an oligonucleotide barcode includes between about 5 to about 8, about 5 to about 10, about 5 to about 15, about 5 to about 20, about 10 to about 150 nucleotides. In embodiments, an oligonucleotide barcode includes between 5 to 8, 5 to 10, 5 to 15, 5 to 20, 10 to 150 nucleotides. In embodiments, an oligonucleotide barcode is less than 10 nucleotides. In embodiments, an oligonucleotide barcode is about 10 nucleotides. In embodiments, an oligonucleotide barcode is 10 nucleotides. An oligonucleotide barcode may include a unique sequence (e.g., a barcode sequence) that gives the oligonucleotide barcode its identifying functionality. The unique sequence may be random or non-random. Attachment of the barcode sequence to a nucleic acid of interest (i.e., the target) may associate the barcode sequence with the nucleic acid of interest. The barcode may then be used to identify the nucleic acid of interest during sequencing, even when other nucleic acids of interest (e.g., comprising different oligonucleotide barcodes) are present. In embodiments, the oligonucleotide barcode consists only of a unique barcode sequence. In embodiments, the 5′ end of a barcoded oligonucleotide is phosphorylated. In embodiments, the oligonucleotide barcode is known (i.e., the nucleic sequence is known before sequencing) and is sorted into a basis-set according to their Hamming distance. Oligonucleotide barcodes can be associated with a target of interest by knowing, a priori, the target of interest, such as a gene or protein. In embodiments, the oligonucleotide barcodes further include one or more sequences capable of specifically binding a gene or nucleic acid sequence of interest. For example, in embodiments, the oligonucleotide barcode include a sequence capable of hybridizing to mRNA, e.g., one containing a poly-T sequence (e.g., having several T's in a row, e.g., 4, 5, 6, 7, 8, or more T's). In embodiments, the padlock probe is at least about 50, 60, 70, 80, 90, 100, 110, 120, 130 or more nucleotides in length. In embodiments, the padlock probe is at most about 300, 200, 100, 90, 80, or fewer or more nucleotides in length. In embodiments, the total length of the padlock probe is about 80, 90, 100, 110, 120, 130, or 140 nucleotides in length.

[0226] In embodiments, the oligonucleotide barcode is included as part of an oligonucleotide of longer sequence length, such as a primer or a random sequence (e.g., a random N-mer). In embodiments, the oligonucleotide barcode contains random sequences to increase the mass or size of the oligonucleotide tag. The random sequence can be of any suitable length, and there may be one or more than one present. As non-limiting examples, the random sequence may have a length of 10 to 40, 10 to 30, 10 to 20, 25 to 50, 15 to 40, 15 to 30, 20 to 50, 20 to 40, or 20 to 30 nucleotides.

[0227] In embodiments, demultiplexing the multiplexed signal includes a linear decomposition of the multiplexed signal. Any of a variety of techniques may be employed for decomposition of the multiplexed signal. Examples include, but are not limited to, Zimmerman et al. Chapter 5: Clearing Up the Signal: Spectral Imaging and Linear Unmixing in Fluorescence Microscopy; Confocal Microscopy: Methods and Protocols, Methods in Molecular Biology, vol. 1075 (2014); Shirawaka H. et al.; Biophysical Journal Volume 86, Issue 3, March 2004, Pages 1739-1752; and S. Schlachter, et al, Opt. Express 17, 22747-22760 (2009); the content of each of which is incorporated herein by reference in its entirety. In embodiments, multiplexed signal includes overlap of a first signal and a second signal and is computationally resolved, for example, by imaging software.

[0228] In embodiments, the method further includes measuring an amount of one or more of the targets by counting the one or more associated barcodes. In embodiments, the method further includes counting the one or more associated barcodes in an optically resolved volume.

[0229] In embodiments, the method further includes an additional imaging modality, immunofluorescence (IF), or immunohistochemistry modality (e.g., immunostaining). In embodiments, the method includes ER staining (e.g., contacting the cell with a cell-permeable dye which localizes to the endoplasmic reticula), Golgi staining (e.g., contacting the cell with a cell-permeable dye which localizes to the Golgi), F-actin staining (e.g., contacting the cell with a phalloidin-conjugated dye that binds to actin filaments), lysosomal staining (e.g., contacting the cell with a cell-permeable dye that accumulates in the lysosome via the lysosome pH gradient), mitochondrial staining (e.g., contacting the cell with a cell-permeable dye which localizes to the mitochondria), nucleolar staining, or plasma membrane staining. For example, the method includes live cell imaging (e.g., obtaining images of the cell) prior to or during fixing, immobilizing, and permeabilizing the cell. Immunohistochemistry (IHC) is a powerful technique that exploits the specific binding between an antibody and antigen to detect and localize specific antigens in cells and tissue, commonly detected and examined with the light microscope. Known IHC modalities may be used, such as the protocols described in Magaki, S., Hojat, S. A., Wei, B., So, A., & Yong, W. H. (2019). Methods in molecular biology (Clifton, N.J.), 1897, 289-298, which is incorporated herein by reference. In embodiments, the additional imaging modality includes bright field microscopy, phase contrast microscopy, Nomarski differential-interference-contrast microscopy, or dark field microscopy. In embodiments, the method further includes determining the cell morphology (e.g., the cell boundary or cell shape) using known methods in the art. For example, to determining the cell boundary includes comparing the pixel values of an image to a single intensity threshold, which may be determined quickly using histogram-based approaches as described in Carpenter, A. et al Genome Biology 7, R100 (2006) and Arce, S., Sci Rep 3, 2266 (2013)).

[0230] In embodiments, the cell or tissue is stained (e.g., contacted and/or incubated with a stain agent). Non-limiting examples of stains include histological stains (e.g., hematoxylin and/or eosin) and immunological stains (e.g., fluorescent stains). A stain is a chemical agent used to selectively color components of biological tissues or cells to enhance their visibility under a microscope. Stains typically bind to specific cellular structures or organelles, such as proteins, nucleic acids, lipids, or carbohydrates, allowing for the differentiation and identification of these structures. In embodiments, the stain is a fluorescent stain (e.g., an intrinsic stain). Intrinsic or fluorescent stains are chemical compounds that possess the inherent ability to emit fluorescence when exposed to specific wavelengths of light, thereby enabling the visualization of biological structures without the need for additional staining agents; examples include eosin, which absorbs light in the blue-green part of the spectrum (around 490-520 nm) and emits light in the green-yellow part of the spectrum (around 520-550 nm), and Hoechst stains, which bind to DNA and emit blue fluorescence around 461 nm. In embodiments, detecting includes directing an excitation light to the cell or tissue and detecting an emission light from the first fluorescent dye. In embodiments, detecting includes directing an excitation light to the cell or tissue and detecting an emission light from the second fluorescent dye. In embodiments, detecting includes directing an excitation light to the cell or tissue and detecting an emission light from the stain. In embodiments, detecting includes directing an excitation light to the cell or tissue and detecting an emission light from the first fluorescent dye, the second fluorescent dye, and the stain. In embodiments, a cell or tissue can be imaged. In embodiments, the method includes detecting an organelle.

[0231] In aspects and embodiments described herein, the methods are useful in the field of predictive medicine in which diagnostic assays, prognostic assays, pharmacogenomics, and monitoring clinical trials are used for prognostic (i.e., predictive) purposes to thereby treat an individual prophylactically. Accordingly, in embodiments the methods of diagnosing and/or prognosing one or more diseases and/or disorders using one or more of expression profiling methods described herein are provided.

[0232] In an aspect is provided a method of detecting a disorder (e.g., cancer) or a disease-causing mutation or allele in a cell. In embodiments, the cell includes an oncogene (e.g., HER2, BRAF, EGFR, KRAS) and utilizing the methods described herein the oncogene is identified, thereby detecting a disorder when the presence of the oncogene is identified. In embodiments, the sample includes a nucleic acid molecule which includes a disease-causing mutation or allele. In embodiments, the method includes hybridizing an oligonucleotide primer which is correlated with the disease-causing mutation or allele. In embodiments, the method includes ligating a mutation-specific oligonucleotide primer only when the disease-causing mutation or allele is present in the nucleic acid target. In embodiments, the disease-causing mutation or allele is a base substitution, an insertion mutation, a deletion mutation, a gene amplification, a gene deletion, a gene fusion event, or a gene inversion event.

[0233] In embodiments, the mutation or allele is associated with an increased predisposition for one or more diseases, disorders, or other phenotypes. In embodiments, the mutation or allele is associated with a decreased predisposition for one or more diseases, disorders, or other phenotypes. For example, some mutations or alleles are associated with a cancer phenotype, such as decreased growth inhibition, evasion of immune detection, or dedifferentiation. Mutations that can be detected using the method provided herein include for example, mutations to BRAF, EGFR, Her2/ERBB2, and other somatic mutations as exemplified by Greenman et al., Nature (2007) 446:153-158, hereby incorporated by reference in its entirety.

[0234] In embodiments, the method further includes contacting the cell or tissue with a stain, wherein the stain specifically binds to a biomolecule. A stain is a chemical agent used to selectively color components of biological tissues or cells to enhance their visibility under a microscope. Stains typically bind to specific cellular structures or organelles, such as proteins, nucleic acids, lipids, or carbohydrates, allowing for the differentiation and identification of these structures. In embodiments, the stain is a fluorescent stain (e.g., an intrinsic stain). Intrinsic or fluorescent stains are chemical compounds that possess the inherent ability to emit fluorescence when exposed to specific wavelengths of light, thereby enabling the visualization of biological structures without the need for additional staining agents; examples include eosin, which absorbs light in the blue-green part of the spectrum (around 490-520 nm) and emits light in the green-yellow part of the spectrum (around 520-550 nm), and Hoechst stains, which bind to DNA and emit blue fluorescence around 461 nm. In embodiments, detecting includes directing an excitation light to the cell or tissue and detecting an emission light from the stain.

[0235] One aspect of the present disclosure provides a method for identifying a morphological pattern in a biological sample (e.g., tissue). The method includes, at a computing device including one or more processing cores, a memory, and a display, obtaining a discrete attribute value dataset associated with a plurality of indicia corresponding to nucleic acid molecules detected in situ within a tissue section. Each indicium in the plurality of indicia represents a nucleic acid molecule hybridized and amplified within its native location in the tissue, and the plurality of indicia may number at least 25, at least 50, at least 100, at least 150, at least 300, at least 400, or at least 1000. The discrete attribute value dataset includes one or more spatial projections of the tissue sample and further includes one or more two-dimensional images of a first tissue section obtained from the biological sample. Each two-dimensional image may include at least 100,000 pixel values and may optionally include a histological image of the tissue, such as an H&E (H&E) image or suitable alternative (e.g., bright-field microscopy image of the tissue). The discrete attribute value dataset further includes a corresponding plurality of discrete attribute values for each indicium, the values being derived from in situ sequencing or fluorescent detection of the nucleic acid molecules at distinct loci. Each corresponding plurality of discrete attribute values may include at least 500 discrete attribute values per tissue section. The method further includes obtaining a corresponding cluster assignment in a plurality of clusters for each respective indicium in the plurality of indicia of the discrete attribute value dataset. The corresponding cluster assignment is based, at least in part, on the plurality of discrete attribute values of the respective indicium, or on a corresponding plurality of dimension reduction components derived, at least in part, from those values. The method further includes displaying, in a first window on the display, pixel values of all or a portion of a first two-dimensional image of the tissue section. The method further includes overlaying on the first two-dimensional image, and co-aligned with the first two-dimensional image, (i) first indicia for each nucleic acid molecule assigned to a first cluster in the plurality of clusters and (ii) second indicia for each nucleic acid molecule assigned to a second cluster in the plurality of clusters, thereby identifying a morphological pattern of gene expression within the tissue.

### EXAMPLES

### Example 1. Spatial Biology and Inflammatory Bowel Disease

[0236] Characterization of the architectural arrangement of cells and structures in tissues is among the most historically important tools in pathology. Over the last two decades, a bevy of molecular methods have become increasingly important for precision diagnostics, yet until recently, it has been necessary to accept the tradeoff that one can either view the structures of samples or query their molecular details, but not both at the same time. This has left a sizable gap in our understanding of many complex diseases, including autoimmunity and cancer, that exist at the interface of these features. A new class of spatial biology technologies that merge morphology and molecular biology are now changing this paradigm. Although promising, the first generation of these tools have limitations that have relegated much of their impact to small studies at the level of anecdotes, rather than large scale clinical research to advance new therapies. Technical constraints on the number of data types that can be interrogated at once, the level of cellular resolution, and sample throughput represent the biggest barriers. To overcome these limitations, we leveraged the unique foundational technology of a multi-omics platform, the G4X, which enables simultaneous transcript counting, protein quantification and the complete sequencing of variable regions of the genome directly in the undisrupted morphological context of a single 5 micron section of standard formalin-fixed tissue. The G4X can process 10 times the tissue area in half the time of existing platforms, entailing a 20× greater overall throughput.

[0237] Inflammatory bowel disease (IBD) is a chronic autoimmune disorder, with ulcerative colitis (UC) and Crohn's disease (CD) representing the main IBD subtypes. Each is characterized by distinct patterns of chronic GI tract inflammation, with UC being primarily restricted to the colon and conferring an increased lifetime risk of colorectal cancer and Crohn's manifesting throughout the gut and frequently complicated by fistulas. Both diseases markedly impact quality of life. Disease flairs and resulting hospitalizations for complications, be they infectious or requiring of surgery, are frustratingly unpredictable. IBD represents a major global burden of disease that is rapidly increasing for reasons that are uncertain but likely relate to changes in diet and lifestyle. Since the turn of the century, in industrialized nations the prevalence has nearly doubled. The US has one of the highest rates in the world: more than 0.7% of the population, representing nearly 3 million Americans, are living with the disease. The economic impact is similarly extensive. The annualized cost of IBD in the US now exceeds $8 billion. Disclosed herein are methods for designing and building the transcript and protein portion of an IBD-focused prototype panel, and using this new panel to process a cohort of 160 real-world IBD clinical samples in an effort to predict treatment response to two modern classes of IBD therapies.

[0238] During the last decade, as the mainstay of treatment has transitioned from steroids and cytotoxic agents to targeted biologics, there have been improvements in IBD outcomes overall, but at the level of individual patients these remain inconsistent. Agents targeting TNF (i.e. Infliximab), integrin α4β1 (i.e. Vedolizumab) and IL12/23 (i.e. Ustekinumab) bring remarkable relief to some, but for others the responses are poor or only transient. This high degree of clinical variability reflects the substantial heterogeneity of the underlying molecular pathogenesis of what we currently categorize into two syndromically-defined diseases. While there have been some successes developing predictive blood and tissue-based biomarkers, their performance is modest and clinical adoption has been limited.

[0239] Part of the challenge is that IBD is not the result of a single molecule or cell type. The disease results from the interplay between multiple cellular and cytokine aspects of the immune system in the context of higher order immunological and barrier structures of the gut and its associated microbiota. Conventional measurement techniques are inherently blind to many key features of IBD pathogenesis insofar as they measure bulk-extracted populations of molecules (traditional molecular biology) or a handful of targets in the context of morphology (traditional immunohistochemistry). Emerging spatial biology tools that can assess highly multiplexed molecular signals in the context of single cells or native architecture have shown promise for disentangling this complexity but remain exploratory and have important limitations.

[0240] IBD is not static over time and varies through the GI tract. Although extensive endoscopic sampling (both spatially and across time) is part of routine clinical care, the low throughput (thus high cost) nature of existing platforms has made them simply impractical for use in large, well powered IBD clinical studies. This challenge has been compounded by the fact that most existing platforms track only one type of analyte (i.e. protein or transcript, thus increasing cost and sample requirements for being able to investigate both) and are not easily adapted to modest plexicity disease-focused applications. Users are often stuck using large, costly panels where most targets are irrelevant to the use-case. The high cost, low throughput, inflexible and awkward multi-platform nature of current spatial multi-omic technologies represent major barriers to the large scale translational studies needed to advance therapy development and patient care in IBD.

[0241] The G4X platform is a spatial multi-omics device. The rapid 4-color dye chemistry, fast scanning optics, powerful image processing hardware and multi-flow cell format underlies the exceptionally large high-resolution spatial scanning field leveraged by the G4X. With a 2× faster run time and a 10× greater sample area, the G4X enables a 20× greater throughput than the current spatial platform market leader. Furthermore, this high run capacity is paired with an innovative front-end sample preparation protocol, facilitating a streamlined end-to-end workflow. A unique hydrogel intermediate transfer process allows 5 μm sections of routine formalin-fixed paraffin embedded (FFPE) samples to be easily picked up, then regions of interest punched out into tiles, prior to transfer to an arrayed template, and then onto the flow cell surface followed by lid assembly. Together with the flexibility to use different sized pieces of tissues on each of the four independent flow cells of a G4X run, as part of a 3 day workflow, a single operator can comfortably prepare up to 128 samples per 24 hour run to achieve clinical study-level sample throughput.

[0242] The unique multiomic readout is achieved with fluorescent detection, for example commonly used in sequencing-by-synthesis (SBS) chemistry. Prior to a high-resolution fluorescent nuclear stain (e.g., hematoxylin equivalent) and a cytoplasm stain (eosin), collectively referred to as a fluorescent HE, or fH&E scan, molecular counting of RNA transcripts and proteins begins using a targeted panel of padlock probes against the transcripts or oligonucleotide-linked antibodies. After binding-mediated ligation and rolling circle amplification, SBS readout is completed (see FIG. 1) The high affinity, short binding arm design of the probes allows high efficiency capture of fragmented transcripts often encountered with archival FFPE clinical samples. Nucleotide-level genotyping via Direct-Seq is achieved similarly to transcript counting, but with a gap-fill step prior to probe circulation to incorporate the target sequence into the probe, which may then be detected.

[0243] An advantage of G4X is that it is a true multi-omic platform that produces four independent data streams from the same exact tissue section: fluorescent H&E, transcript count, protein expression, and direct sequencing. Not only does this translate to a marked reduction in cost and labor compared with use of adjacent FFPE sections on multiple different platforms, it conserves precious clinical research samples and makes it possible to fully relate together independent types of data types down to the level of individual cells within their native architecture. This degree of resolution is an indispensable feature for characterizing the exceptionally complex host-immune cell and molecular interactions within IBD. We have selected inflammatory bowel disease, a high-prevalence, high-morbidity and high-cost clinical condition to develop and deploy a disease-focused spatial multi-omic panel.

[0244] To demonstrate the multi-modal G4X data output, we initially used an immune-focused panel targeting 153 genes and 10 protein targets to highlight intricate lymphoid structures in normal human tonsil (FIG. 2A-C). High resolution UMAPs were assembled from transcript only, protein only and a combined readouts which identified clusters that were distinct from either modality alone. To demonstrate compatibility of the G4X with colon, we used a 155-gene transcript panel on a normal human colon sample (FIG. 2D). As shown at two magnifications, single-cell level resolution from nearly three dozen cell-types was easily appreciable. The data indicates that the G4X spatial biology platform produces single-cell resolution transcript data from colon.

Building a Panel that is Tailored to the Pathophysiology and Therapeutically-Relevant Pathways of IBD.

[0245] In one prophetic example, ten banked FFPE (formalin-fixed, paraffin-embedded) ulcerative colitis (UC) samples are selected. These samples are collected endoscopically as part of routine care and processed using standard clinical pathology procedures. The samples are randomly selected, ensuring a fair representation of an expected range of UC disease activity, with the goal that half of the samples are more than five years old. These samples were prepared and analyzed on the G4X system, employing an immuno-oncology (IO) panel comprising approximately 200 genes and 8 proteins. The data generated was processed using the onboard image processing workflow, which includes image registration, cluster detection/base-calling, image stitching, nuclear-based cell segmentation, and output file generation.

[0246] For each sample, we can assess the data quality and yield from the each of the 3 information streams for comparison to those from the same panel previously run on normal colon and other tissues. Success of this aim will entail seeing similar average performance (and no drastic increase in outliers) between UC and our historical controls. We can quantitatively assess the following metrics and expect roughly the performance listed per data modality. For the RNA channel, we can enumerate mapped transcripts per cell. We expect ˜50 transcripts per cell, ˜25 unique genes per cell, and a false discovery rate of less than 2% (as determined by both negative control probes and negative control “codewords”). For the protein channel, we can quantify signal-to-noise ratio (protein intensity in positive cells vs negative cells) and expect this to average of ≥5 and with a correlation between protein intensity and paired transcript target expression level of r2≥0.6 per protein, as was done with transcript-based hierarchical cell-type specific clustering in the colon data in FIGS. 4A-C.

[0247] For the fluorescent H&E (fH&E™) modality, feedback is solicited from a trained pathologist at the collaborating academic site providing the samples. The pathologist compares the G4X-generated fH&E with a traditional H&E section from each block. Moreover, Hover-Net is employed to classify cell types from the fH&E alone, and these classifications are compared to cell types determined by the RNA modality, with an expected agreement of ≥90% between the two classifications. If more than 20% of the samples fall below the quantitative or qualitative target quality threshold for any given modality, an investigation is conducted to determine if the issue can be attributed to the age of the block, block-to-block variability, or variability in the assay/platform. Additional sections or samples are run as needed to address these issues.

[0248] Adding and/or removing target genes or proteins to the panel may be required. This will allow for the rapid identification of any key IBD targets that may present challenges, such as poorly specific or incompatible antibodies, or low transcript copy numbers. The panel is designed to broadly address the following areas: 1) normal structures and cell types of the colon and adjacent tissues; 2) key cell subsets of the adaptive and innate immune systems; 3) components of activity-reflecting signaling pathways implicated in ulcerative colitis (UC) and Crohn's disease; 4) therapy-relevant pathways, including the targets and downstream elements of major and emerging classes of biologic agents; and 5) key transcripts or proteins associated with IBD-related complications, such as neoplastic transformation, fistula formation, and infection. The panel builds upon the contents of prior exploratory immuno-oncology and gastrointestinal (GI) system panels, supplemented with an extensive literature search, preliminary IBD-specific transcriptional profiling data (bulk, single-cell, and lower-resolution spatial technologies), a review by clinical collaborators of ongoing UC and Crohn's disease studies in ClinicalTrials.gov, and interviews with at least five key-opinion-leader experts.

[0249] For the protein aspect of the panel, 2-4 additional IBD-relevant proteins are incorporated, focusing on those with expected unique clinical relevance related to targets of IBD therapies and/or markers commonly used in immunohistochemistry (IHC) in GI pathology (e.g., PanCK, CD31, aSMA, KI67). Serotype controls are included as quality control (QC) elements. Commercially-available antibodies are ordered, oligo-conjugated, and tested on ten IBD clinical samples (both active and quiescent). These tests are conducted in groups of four, with basic titrations of antigen retrieval conditions, antibody concentration, and amplification conditions.

[0250] For the transcript portion of the panel, approximately 6-12 probes per gene target are designed for each gene, with careful consideration of sequence context, GC content, and splice variants during probe footprint selection. The panel is tested on the same ten samples mentioned above, with 1-2 rounds of relative concentration adjustment or probe dropout conducted to achieve maximally uniform capture without the need for redesign.

[0251] Additionally, probes enabling gap-filling (i.e., Direct-Seq™) targeting of variable regions of TCRs, HLA or SNP loci sites associated with disease risk/response to therapy, or hotspots in cancer driver genes are contemplated herein.

[0252] In another prophetic example, the IBD panel is used to generate data from 160 UC samples, collected from 80 patients at two time points-before and 14 weeks after the initiation of one of two novel therapeutic agents. This cohort is selected to represent a range of clinical responses to these treatments. The primary objective is to assess the performance of the prototype panel across a broad diversity of real-world samples, gaining insights into the uniformity of target performance and the relevance of each element in the panel. The sample set includes variables that provide hypothesis-generating observations, which inform future panel refinements and support the design of larger clinical utility studies.

[0253] The 80 UC cases are selected from a cohort of previously banked, endoscopically-collected FFPE samples, with each case including samples taken before treatment and 14 weeks after treatment initiation. For 40 patients, the treatment involves an integrin α4β1 inhibitor, while the remaining 40 receive an IL12/23 blocker. Within each therapeutic group, 20 patients are identified as good responders (as defined clinically and endoscopically at 14 weeks) and 20 as primary poor responders. This study therefore encompasses 160 real-world IBD samples from patients undergoing modern therapies with clinically-relevant outcomes.

[0254] To ensure proper sample preparation and adherence to clinical sample use restrictions, tissue blocks are sectioned and mounted on G4X flow cells at the hospital site of a clinical collaborator. The 160 samples are de-identified and blinded regarding clinical status. A 32-sample/4×4 mm section flow cell format, is utilized with extra sections included as backups. The samples are processed using the IBD G4X panel, as developed previously, with all samples run and data processed uniformly.

[0255] Secondary and tertiary analyses include applying a custom multi-modal graph-based clustering method (from the Leiden and igraph libraries) to identify cell types, and a multi-modal dimensional reduction method (from the RAPIDS library) to process the data. These analyses are used to confirm the recovery of expected cell types and expression profiles, and to serve as a basis for cellular neighborhood analysis, aiming to identify therapeutically-relevant cell populations and interactions.

[0256] Performance is measured by the quality of the data and the ability to process it in 2-3 runs over the course of 1-2 weeks. The generated data is analyzed for spatial multi-omic correlations regarding: 1) pre- vs post-treatment time points, 2) class of drug, 3) responder vs non-responder status within each modality, 4) relationships between molecular and histological features such as ulceration, 5) cell-cell neighbor interactions predictive of any of the above, and 6) other patient demographics such as age, age-of-onset, prior treatment history, or longer-term outcomes, where available.

[0257] Sample availability, human subjects and diversity. In terms of diversity of clinical demographics, the gender, ethnic, and age breakdown of the study population is expected to approximate the broader IBD population for which the future clinical research product will be used. It is well established that the incidence of IBD is as much as 3× higher in the US and Western Europe than elsewhere in the world. The prevalence of UC is 1.5 higher in males than females and has an age peak of 40-50 years old.

[0258] The aforementioned products will be important for researchers studying tumor heterogeneity to obtain a more comprehensive view of the tumor microenvironment in the bone marrow by obtaining direct data on tissue morphology, gene expression, protein and specific TCR sequences all within the same tissue section. Furthermore, the ability to sequence critical portions of T-cell receptors in a spatial context to study cell-to-cell interactions and modulations of cellular function will be valuable in directly understanding immune response.

[0259] Uncovering clonality data on T-cells will allow better understanding of the phenotypic and function characteristics of the expanded clones to illuminate potential targets for therapies, such as immune checkpoints or other molecular targets to enhance T cell killing of cancer cells. Naturally, one of the interesting aspects of spatial analysis is the ability to also look at a variety of cell types. So, having identified T cell clonotypes in situ, neighborhood analysis could also be evaluated for evidence of cell-cell interaction with not only other T cells, but also other immune cell types such as myeloid and stromal cells. Finally, the same approaches we will utilize for TCR detection could be adapted to BCR detection as well, so that studies of B cell clonality could be undertaken as well. The methods, compositions, and devices described herein can detect gene expression and proteins together with fluorescent H&E all from the same FFPE tissue section. Additionally, the TCR immune profiling panel will enable detection of the CDR3 region of TCR in healthy and diseased FFPE tissue samples on the same platform. As a high throughput assay that can return data on the location of different biomolecules and their proximity to neighboring molecules, these methods will also enable the building of “cellular atlases”. These spatial maps can describe the what, where, and when of different biological processes to drive our understanding of how cells in the human body work together in health, cancer, and treatment.

### Example 2. Profiling of TCRs In Situ

[0260] Biology is fundamentally rooted in the cellular structure of tissues. Many current diagnostic and research techniques for examining molecular biology inherently disrupt much of this important architecture. Single-cell sequencing has revealed intricate cellular molecular states, a significant advance over bulk sequencing methods that only offer aggregated information. This technology has dramatically improved our understanding of cancer biology, from elucidating cell-to-cell differences inter- and intratumorally, to enabling tracking of tumor evolution and responses to treatment. The recent emergence of Spatial Multi-Omics technologies promises to provide spatial context to tissue analysis. Currently available spatial platforms fall into two categories: digital spatial profiling (e.g. Visium and GeoMx), which lack single cell resolution, and in situ methods (e.g. Xenium, CosMx and MerScope) which lack the ability to read out unknown sequences. In addition to these limitations, the analysis throughput is limited to a handful of small samples for all these platforms.

[0261] We have recently developed methods to perform Next Generation Sequencing (NGS) inside cells and tissues, providing a universal in situ readout for gene transcription, protein expression and direct sequencing of variable regions. As described supra, the G4X spatial sequencer enables unparalleled sample throughput (20-fold greater than any existing platforms) and combined readout of transcriptomics, proteomics and direct sequencing of target sequences (Direct-Seq) in the same FFPE section. Indeed, direct T-cell receptor sequencing as an additional readout will enable the spatial tracking of T-cell clonotypes with paired transcript and protein profiling for clinical-scale studies, which has thus far been unattainable.

[0262] Unified readout for multi-omic profiling in the same section. The unified sequencing readout of all three modalities illustrated in FIG. 1 allows for fast cycle times. In addition, we use fluorescent dyes for the cytoplasm and nucleus to generate fluorescent H&E images (fH&E). We have profiled 105 transcript targets, 3 protein targets and generated a fluorescent H&E image from the same kidney section (see FIG. 3). We chose kidney as an example because of its clear spatial structures easily distinguished by transcript profiling, protein profiling and fH&E, thus allowing easy visual inspection of correspondence of targets and specificity of targeting. The transcript and protein maps have been coded such that targets for the same tissue structure are colored similarly. Example structures that are easy to pick out in multiple modalities are the glomeruli (magenta for transcripts and protein, balls of nuclei in the H&E) and blood vessels (purple in the transcript map and morphologically distinct in the H+E). This data shows that we can profile transcripts, protein, and fH+E in the same tissue section.

[0263] Low quality samples: To get sufficient signal for sequencing requires amplification of our targets. As outlined above and illustrated in FIG. 1, for all 3 modalities readout by SBS, one amplification protocol envisioned is rolling circle amplification (RCA). A single probe is sufficient to generate a detectable sequencing result. In the case of damaged samples, this means we only need short intact regions of RNA molecules for detection. The kidney data in FIG. 3 demonstrates that the approach is compatible with FFPE tissue samples and allows working with even more highly degraded samples.

[0264] We developed and implemented a custom image processing and bioinformatics pipeline that can be run on sequencing instruments to process the large-scale multi-omic data produced from each in situ sequencing run. First, all acquired images are registered using the x-y locations of fiducial beads as stationary, ground-truth anchors. Then, for transcriptomic and direct-sequencing modalities, spots are detected by fitting a range of Laplacian of Gaussian filters to each fluorescence channel individually, identifying the locations of local peaks, and extracting intensities across all channels and sequencing cycles using a kernel centered on the identified peak. In this way, each detected spot is reduced to a channel & cycle intensity vector, which is then input to a base-caller to produce sequences for each spot. For the transcriptomic panels, these sequences are matched to the expected sequences for each target with a maximum allowed number of errors based on the panel design, while for direct-sequencing applications these sequences are used as-is for downstream analyses. For the protein readout modality, registered images are assembled into tissue section-level montages for each protein; image transformations are applied to correct for the known spectral cross-talk of the fluorescent dyes used, as well as to remove autofluorescence and fiducial beads. Fluorescent H&E conversion is also applied to registered, section-level montages of the corresponding fluorophore channels. Finally, segmentation is performed using a custom-trained cytoplasmic model implemented with Cellpose, which takes as input the protein-based segmentation markers in one channel and a nuclear fluorescent marker in a second channel. Single-cell profiles are constructed by intersecting the transcript/direct-sequencing locations with the segmentation mask and calculating the intensity of each protein within the nuclear and membrane regions of the segmentation mask. The final outputs of the pipeline consist of tissue section-level fluorescent H&E, protein, and segmentation mask images (in OME-Zarr format), transcript/direct-sequencing tables (in csv format), cell by transcript/direct-sequencing/protein tables (in csv format), and a compiled SpatialData object where the coordinates for all outputs are defined by a tissue section-level registered framework.

[0265] We have additionally developed a padlock probe designer for our targeted panels that can generate probe sets for any combination of human gene targets with a pre-specified hamming distance criterion and uses the estimated melting temperatures of off- and on-target binding events to maximize specificity.

[0266] Optimization of Direct-seq for TCR sequencing in cells. The T-cell receptor (TCR), found on the surface of T cells, plays a crucial role in recognizing antigens and triggering an immune response. Profiling the TCR repertoire reveals the T-cell clonal dynamics that underlie an immune response and may shed light on the antigenic stimuli for such responses. However, analyzing the diverse TCR repertoire is challenging. The small set of genes that encode the T-cell receptor can create between 10¹⁵ and 10²⁰ TCR clonotypes (a clonotype is a population of T cells that carry an identical TCR, see Nikolich-Zugich et al., 2004. The many important facets of T-cell repertoire diversity. Nat. Rev. Immunol. 4, 123-132; and Miles et al., Bias in the [α][β]T-cell repertoire: implications for disease pathogenesis and vaccination. Immunol. Cell Biol. 89, 375-387). Although the most general approach is to sequence the hypervariable complementarity determining region 3 (CDR3) within the TCRβ chain only, we expand this to its paired strand, TCRα, as well.

[0267] Taking TCRβ as an example, our implementation of inverted molecular probes (padlock probes) for Direct-Seq to characterize TCR sequences will utilize work from Montagne et al (TCRβ, from ref Montagne et al., 2020. Ultra-efficient sequencing of T Cell receptor repertoires reveals shared responses in muscle from patients with Myositis. EBioMedicine 59, 102972, which is incorporated herein in its entirety by reference for all purposes). Probes will be designed such that CDR3-targeting primer pairs form the 3′- and 5′-end of the probes, which also contain a common primer binding site for RCA amplification (FIG. 5). These synthetic probes will be pooled, mixed with the corresponding probes for TCRα, and tested in pure and mixed populations of cell lines, as described above. Once probes are annealed to TCRαβ RNAs in fixed cells, the 3′-ends are extended by reverse transcription, generating a copy of the highly variable CDR3 region. By using a Reverse Transcriptase (RT) with limited strand displacement activity (e.g., an ‘RT’ as described herein), we have demonstrated that extension can proceed until the extension product encounters the 5′-end of the padlock probe, effectively halting extension. The elongated 3′-end of the probe can then be enzymatically ligated to its own 5′-end further upstream to form a ssDNA circle, which serves as a template for Rolling Circle Amplification (RCA). Post amplification, RCA products are sequenced in-situ. In parallel, we will harvest RNA from each cell line, perform TCR targeted RT, PCR and Sanger sequencing of the CDR3 regions. This will provide a ground truth for our readout sequences obtained in situ. In addition, including transcript and protein detection will allow us to confirm the cell type associated with each CDR3 sequence, also in situ.

[0268] We have established and optimized antigen retrieval conditions without compromising RNA detection efficiency and are compatible with a wide variety of antibodies. For each new protein target we identify a prioritized list of antibody clones with well-characterized specificity from literature and clinical diagnostics, and screen for desired staining morphology using standard immunofluorescence readouts in standard assay conditions. To highlight the success of our approach, we recently identified antibodies for 14 new protein targets by screening 47 unique antibody clones and identifying a top candidate to conjugate for each target. Once antibodies are conjugated to a unique DNA oligo (antibody-oligonucleotide (Ab-O) conjugates), we confirm staining morphology of conjugated antibodies matches that of unconjugated antibodies using fluorescent secondary antibodies and sequencing output.

[0269] In-situ measurements of RNA, proteins, and TCR sequencing. We will apply the methods and reagents described herein to profile at least 200 gene transcripts and 20 or more proteins. Additionally, we will also use the in-situ TCR sequencing methods described herein to analyze the highly variable CDR3 regions in the Alpha and Beta receptors.

[0270] Once the 5-micron thick tissue sections have been deposited on the functionalized slides (e.g., a solid support as described herein), the tissue sections undergo removal of paraffin and heat-induced breaking of fixation bonds. Then, DNA-labeled antibodies will be incubated with the samples, and padlock probes will be hybridized to the RNA targets. After washing steps, the padlock probes will be ligated to form circular products. For TCR sequencing, an additional step is introduced where the targeted RNA sequence is copied into the padlock probe, and then ligated to the 5′ end of the probe. Based on published articles on B & T cell receptor profiling, it is expected the number of probes to multiplex for Direct-Seq of TCR profiling will be in the order of 400-600 probes. From there, subsequent steps will be performed including amplification (e.g., rolling circle amplification (RCA)), binding of sequencing primers, and 4-color sequencing. Multiple cycles of priming & sequencing will be used to enable higher density readout, by separating different groups of genes & proteins into different sequencing cycles. Each sequencing cycle ends with a permanent termination step (e.g., using irreversibly terminated nucleotides, such as ddNTPs), so that those targets no longer generate any sequencing reads.

[0271] The images acquired at each sequencing cycle will be automatically registered (cycle to cycle, and among the 4 color channels) using fluorescent particles as fiducials. The signals from each amplification cluster will be located and extracted to determine the sequence of the RNA targets. The in situ sequence data will be used to create a map of gene expression, with sub-micron positional accuracy. Protein images will be processed and stored in a near-lossless compressed format for further analysis.

[0272] Following cell segmentation, based on a combination of nuclear staining and membrane staining, single cells will be identified, and expression of transcripts will be used for clustering and annotation. We also take advantage of the protein measurements to assist with classification of cell type and state. Then, we assess the abundance of each cell type at each time point and treatment condition. We will then leverage the spatial information to computationally deconvolute cell type mixtures in the spatial transcriptomics data to identify niches of different leukemia and/or immune cell composition. We will fully characterize the quantity and composition of leukemia-immune niches in each disease and treatment setting to better understand what cell types interact together in coordinated networks to mediate response or resistance. Selected cell-cell interactions identified may be further validated with proximity ligation assays in additional studies.

[0273] TCRα and TCRβ CDR3 sequences will be assigned to segmented CD4+ and CD8⁺ T-cells, and clonotypes will be defined by T-cells that share identical TCRα and TCRβ CDR3 sequences. We will utilize these data to address two major questions: is there evidence of antigen-specific (whether shared across patients or patient-specific) expansion prior to therapy and how does therapy affect clonal evolution both in terms of expansion rates as well as activation status? The first question will be answered by assessing clonality as defined by strict nucleotide sequence similarity as well as by functional convergence, i.e. using the amino acid sequence, secondary structure, and binding characteristics to identify functionally similar CDR3s as described in recent methodologies, and determining the extent of clonotype overlap across patients. (Zhang, Z., Xiong, D., Wang, X. et al. Mapping the functional landscape of T cell receptor repertoires by single-T cell transcriptomics. Nat Methods 18, 92-99 (2021) and Huang, H., Wang, C., Rubelt, F. et al. Analyzing the Mycobacterium tuberculosis immune response by T-cell receptor clustering with GLIPH2 and genome-wide antigen screening. Nat Biotechnol 38, 1194-1202 (2020)) The second question will be answered by tracking clonotype fate for each patient across the therapeutic time course and utilizing the paired transcriptional profiles to determine activation state at each time point. We envision that these data will serve as the basis for follow-up studies where the identity of antigens targeted by expanded and/or shared clonotypes can be elucidated. Additionally, the methodology may be extended to similar in-situ profiling of B-cell receptor sequences, as we have demonstrated in proof-of-principle studies.

[0274] In humans, the adaptive immune system's complexity is underscored by the unique mechanism of T-cell receptor (TCR) generation, a process essential for the specific recognition of antigens by T lymphocytes. This process involves the random rearrangement of genomic V(D)J-variable (diversity) joining-segments, mirroring the generation of antibody diversity in B lymphocytes through somatic VDJ recombination of the B-cell receptor locus. The result is a heterodimeric TCR, composed of αβ or γδ chains, each a product of V(D)J recombination. This sophisticated genetic recombination endows T lymphocytes with the capacity to recognize a vast array of antigens, central to the body's adaptive immunity.

[0275] The focal point of TCR diversity, the complementarity-determining region 3 (CDR3), encompasses the VDJ recombination junctions and encodes the TCR segment that directly interfaces with peptide-bound major histocompatibility complex molecules. Given its pivotal role in antigen recognition and the consequent immune response, the CDR3 sequence and the identity of the flanking V and J gene segments become invaluable markers for classifying TCR variants. This intricate diversity of TCRs, generated exclusively within T cells, presents a unique opportunity to employ TCR profiling as a precise tool for enumerating and quantifying T-cell clonality, a technique that holds significant implications for the diagnosis and treatment of hematologic malignancies.

[0276] The evolution of methodologies for characterizing T-cell proliferation and diversity reflects scientists' growing understanding of the immune system's complexity. Initial techniques, such as Southern blot hybridization, polymerase chain reaction (PCR), and flow cytometry, laid the groundwork for exploring T-cell behavior and clonality. However, the advent of next-generation sequencing (NGS) technologies marked a pivotal shift, enabling an unprecedented depth and breadth of analysis. NGS facilitates extensive, high-throughput measurement and analysis of both TCRs and B-cell receptors (BCRs), offering a window into the immune system's functionality in both health and disease. This technological leap has led to the estimation that a single human individual harbors approximately 106 unique TCR sequences, a testament to the adaptive immune system's versatility.

### Example 3. Code-Probe Colon Panel

[0277] The human cell contains about 20,000 to 30,000 genes coding for functional proteins, yet only a small fraction is expressed in any cell at any time. The specific phenotype of a cell is thus derived from the expression of the subset of genes, and studies of cell phenotypes can be performed by gene expression analysis. Messenger RNA (mRNA) is the molecular carrier transporting genetic information from nuclear DNA to the cytoplasmic machinery of protein synthesis. Consequently, mRNA provides an ideal point of investigation in understanding gene functions and correlating their expression to the physiological and pathological phenotype of cells and tissues. For example, analyzing gene expression levels and the biological pathways associated with the genes involved in a cancer, enables one can study the difference between normal cell and cancerous cell pathways to determine the genetic origin of the faulty pathway, thereby identifying potential targets for treating cancer. Furthermore, gene expression analysis facilitates the discovery of biomarkers and gene signatures, which are crucial for diagnosing diseases, monitoring their progression, and predicting responses to therapeutic treatments. In cancer, gene expression profiling aids in developing gene biomarkers and signatures that enhance diagnosis, track disease progression, and predict treatment outcomes, ultimately contributing to personalized medicine approaches.

[0278] Traditional methods for analyzing gene expression are essential tools in molecular biology, involving the extraction and quantification of mRNA from cells or tissues. One foundational technique is Northern blotting, where specific RNA molecules are detected within a sample by separating RNA by gel electrophoresis, transferring it to a membrane, and hybridizing it with a labeled complementary probe, with the signal intensity reflecting the presence and quantity of the target RNA. A brute-force approach of capturing gene expression information is simply by isolating regions of interest from within a sample. For example, these regions can then be individually placed in test tubes for RNA extraction and subsequent gene expression profiling. For comprehensive data on the entire transcriptome, RNA sequencing (RNA-Seq) is often employed. In RNA-Seq, RNA is converted to cDNA and used to make a library of nucleic acid molecules, which are then sequenced on next generation sequencing (NGS) platforms like the G4™ or NextSeq 2000™.

[0279] Instead of extracting RNA molecules from individual parts (or cells) within a tissue, one can visualize them directly in their original environment. Detecting RNA in situ with spatial surroundings provides critical insights into the spatial organization of gene expression, enhancing our understanding of tissue architecture, cellular interactions, developmental processes, disease mechanisms, and functional genomics. Detecting nucleic acid molecules in cells or tissues enables the observation of spatial heterogeneity within tissues, revealing how gene expression varies across different regions and cell types, and illuminates how local interactions regulate gene expression patterns. Technologically, in situ RNA detection preserves spatial information that is often lost in traditional bulk RNA sequencing, providing a more accurate representation of gene expression patterns. With single-cell resolution, it enables detailed analysis of cellular diversity and heterogeneity, and when combined with other imaging techniques, it offers a multi-dimensional view of cellular function.

[0280] An early variant of in situ hybridization (ISH) detection was published in the late 1960s (J. G. Gall, M. L. Pardue, Proc. Natl. Acad. Sci. USA 1969, 63, 378) and has since evolved for visualizing gene expression. One widely used in situ technique is Fluorescence In Situ Hybridization (FISH). FISH utilizes fluorescently labeled probes that hybridize to specific RNA sequences within the tissue. This method allows for the visualization and localization of target RNA molecules with high spatial resolution. FISH is particularly useful for detecting specific gene transcripts and chromosomal abnormalities. However, the number of distinct fluorophores that can be used simultaneously is limited due to spectral overlap. The number of RNA species that can be simultaneously imaged by FISH has been limited. Most experiments stain and image only one RNA species at a time, and even the most advanced multiplexing efforts have only extended this approach to the simultaneous measurement of approximately 10-30 RNA species (Lubeck E, Coskun A F, Zhiyentayev T, Ahmad M, Cai L. Single-cell in situ RNA profiling by sequential hybridization. Nat. Methods. 2014; 11:360-361 and Martin K C, Ephrussi A. mRNA localization: gene expression in the spatial dimension. Cell. 2009; 136:719-730). However, many interesting questions require much higher levels of multiplexing, such as transcriptional definitions of cell phenotyping. Additionally, the resolution of FISH detection, while sufficient for many applications, may not be adequate for detecting very small or low-abundance transcripts, potentially leading to incomplete or biased gene expression data.

[0281] Multiplexed, Error-Robust, Fluorescence In Situ Hybridization (MERFISH) (Chen et al. Science. 2015; 348:aaa6090) enables multiplexing by assigning barcodes to different RNA species and then reading out these barcodes through successive rounds of hybridization and imaging on the same sample. NanoString Technologies (now Bruker Spatial Biology) provides a platform for in situ gene expression, the CosMX Spatial Molecular Imager, which utilizes barcoded probes to target thousands of RNA sequences simultaneously, greatly improving multiplexing. 10× Genomics also offers a platform to in situ analysis relying on barcoded probes. In these approaches, each RNA species is often identified not by a single color of fluorescently labeled FISH probe but rather with a unique combination or “barcode” of colors. For example, one RNA molecule might be identified by red-labeled probes alone while another might be identified by the combination of red-, green-, and yellow-labeled probes. The barcoded probes extend the concept used by FISH probes, by replacing the single fluorescent label with a barcode domain. The barcode domain contains consecutive regions that hybridize to unique reporters that are read out over sequential imaging rounds. In practice, a substantial limitation to multiplexing arises from the readout errors that are inherent to FISH. For example, occasionally an RNA molecule that should fluoresce in one imaging round does not accumulate enough fluorescently labeled probe to produce a bright enough signal to be detected. Additionally, stray probes or a bright autofluorescent spots in the cell can sometimes produce a spot bright enough to be called an RNA when it is not actually present.

[0282] Barcoded probes typically include both a target sequence binding domain (e.g., 60-80 nucleotides) and a unique barcode domain (e.g., 40-50 nucleotides). The necessity of unique barcodes for each target limits the number of RNA species that can be analyzed simultaneously, constraining multiplexing capacity. Managing these barcodes introduces additional complexity and potential sources of error, as there is a risk of barcode cross-reactivity and misassignment, which can lead to erroneous data. Furthermore, the added barcode sequence may interfere with the binding efficiency or stability of the probe, potentially compromising sensitivity and specificity. For example, if a barcoded probe binds to an off-target sequence due to a mismatch in the target domain or off-target hybridization of the barcode domain, the detection of the barcode could lead to a false positive, mistakenly identifying the target RNA as present. Barcodes can also increase the molecular weight and steric hindrance of probes, potentially affecting their performance in dense or complex tissue environments.

[0283] In the context of in situ RNA detection, relying on barcodes for target identification presents several challenges. One significant issue is the limited spatial resolution that can result from insufficient barcode sequence length. If the barcode is too short, it may not generate enough unique sequences to accurately identify and distinguish between different RNA molecules within the complex tissue environment, leading to overestimation of molecular counts due to amplification artifacts. On the other hand, an overly long barcode sequence or an inadequate number of barcode sequences can result in under-sampling, where not all unique RNA molecules are captured, causing underestimation of molecular counts. Additionally, errors during barcode sequence synthesis or sequencing can introduce noise and cause misassignment of barcodes, complicating the spatial mapping of RNA molecules and leading to inaccuracies in gene expression data. This misidentification can be particularly problematic in in situ hybridization, where precise spatial information is crucial for understanding tissue architecture and cellular interactions. Moreover, the additional steps required for decoding and mapping barcode sequences increase the complexity and computational burden of the analysis, making the process more time-consuming and prone to errors.

[0284] In contrast, the “barcode-free” probes described herein includes the target sequence binding domain and utilizes sequencing that domain for target identification, offer significant advantages. These probes simplify design and synthesis, reduce production costs, and enhance scalability. Without barcodes, there is less risk of cross-reactivity, and the binding efficiency and stability of the probes are potentially improved, leading to higher sensitivity and specificity. Additionally, without the need for barcode decoding, data processing is streamlined, reducing computational demands. The streamlined data processing reduces computational demands, making “barcode-free” probes a superior choice for comprehensive and efficient in situ gene expression analysis. The uniqueness of these probes enables the detection of a vast array of genes, (e.g., greater than 250 different target sequences) within the same sample without unintended non-specific interactions with other cellular components, particularly genomic DNA which exhibits a natural non-specific affinity for single stranded DNA. Careful design of the sequences is thus required to ensure target specificity and orthogonality to other probes when detecting multiple targets.

[0285] The approach described herein significantly enhances specificity and robustness by requiring two hybridization events for detection of a target sequence. Each oligonucleotide probe includes two target hybridization sequences (code-foot 1 and code-foot 2). These sequences bind to adjacent regions of the target RNA. Following successful binding of both code-feet, a ligation step forms a circular polynucleotide, which may be amplified using rolling circle amplification (RCA), and subsequently detected. This dual-binding requirement ensures that if only one code-foot binds to an off-target sequence, the second code-foot will likely fail to bind, preventing the formation of an amplifiable circular probe and thus avoiding false positives. This mechanism significantly enhances the accuracy and specificity of target detection compared to single hybridization events employed in common barcoded probe techniques.

[0286] In our current implementation of Code-Probe detection, each oligonucleotide probe includes three basic components. A code probe is a single-stranded oligonucleotide that includes a first code-foot (e.g., 3′ code-foot) and a second code-foot (e.g., 5′ code-foot) on either end and is linked together via a linking oligonucleotide sequence (referred to as a backbone). The linking oligonucleotide sequence may include one or more primer binding sequences (e.g., an amplification and/or sequencing primer binding sequence) and/or an error-correcting barcode which may be sequenced alone and/or in combination with the code-feet.

[0287] In designing our panel of probes for gene expression analysis, we imposed several stringent constraints to ensure specificity and efficiency. Each probe consists of two hybridization sequences, referred to herein as code-feet, that are typically less than 20 bp each. Additionally, each code-foot was constrained to a GC content of 45-65% and prohibited from containing four consecutive guanines (Gs) or cytosines (Cs) to minimize the risk of secondary structures and non-specific binding. The binding of the probe to the target sequence should be tight and highly specific in order to avoid any interference, for example having less than or equal to 8 bp overlap with any backbone. The thermodynamics of base pairing, in fact, determine the strength of binding while the nucleotide combination ensures its specificity as a consequence of the uniqueness of base succession. However, unique sequences endowed with high binding energy are not necessarily good probes if the target sequence is inaccessible due to secondary structures.

[0288] Both the sensitivity and specificity of a particular probe depends upon the binding energies, AG, of polynucleotide molecules to the probe. In particular, the hybridization intensity traces a sigmoidal curve which follows the melting curve of the probe, decreasing as the binding energy increases. Specificity, however, is maximum at or slightly above the melting temperature of the probe (i.e., at a binding energy that is equal to or slightly greater than zero). Thus, in embodiments, the sensitivity and/or specificity are determined or predicted from the binding energies, provided additional criteria described herein are met. It is noted that the skilled artisan readily appreciates that the term “binding energy,” as used herein, refers to the difference of the energy of polynucleotide molecules (e.g., a target polynucleotide and a polynucleotide probe) when they are in a bound state (i.e., when they are bound or hybridized to each other) from when they are in an unbound state. This definition is readily expressed mathematically by the formula ΔG=G_{bound}−G_{unbound}. Thus, a polynucleotide that has the “largest” binding energy to a particular probe is one for which the difference between the energies of the bound and unbound polynucleotide is greatest. In particular and as the skilled artisan also readily appreciates, because the energy of polynucleotides in a bound state is ordinarily lower than the energy of the unbound polynucleotides, the binding energy (i.e., AG) will ordinarily be a negative number. Thus, as used herein, the polynucleotide having the “largest” binding energy to a particular probe will, in fact, be the polynucleotide for which AG is the most negative.

[0289] Reliable oligonucleotide design is crucial for successful binding and detection, and given the diversity of targets and multiplexing, the design of oligonucleotides requires flexibility in the approach. Thus, a number of oligonucleotide design tools exist, for example PrimerSelect (Plasterer T N., Methods Mol. Biol., 1997, vol. 70 (pg. 291-302)), Primer Express (Applied BiosystemsPrimer Express® Software Version 3.0 Getting Started Guide, 2004), OLIGO 7 (Rychlik W., Methods Mol. Biol., 2007, vol. 402 (pg. 35-60)) and Primer3 (Untergasser, A. et al., Nucleic Acids Res 40, e115 (2012)). Additional online tools, for example the OligoAnalyzer™ Tool provided by Integrated DNA Technologies (accessible at www.sg.idtdna.com/pages/tools/oligoanalyzer) or PrimerROC (Johnston, A. D., Lu, J., Ru, Kl. et al. Sci Rep 9, 209 (2019)) sheds additional insight into the secondary structure of oligonucleotides and the resulting amplification products, as well as the self- and heterodimerization tendencies of each primer set. Primer-BLAST is another web service that supports the selection of effective sequences by considering opportunities for mispriming across an entire genome or transcriptome (Sayers E W et al., Nucleic Acids Res., 2012, vol. 40 (pg. D13-D25)). Additionally, RNAFold, provided with ViennaRNA Package 2.0 (Lorenz R, et al. Algorithms Mol Biol. 2011 Nov. 24; 6:26) utilizes thermodynamic principles to determine the most stable structure based on the sequence provided, offering insights into the functional properties and cross-interactions. These tools are useful starting points for evaluating oligonucleotide sequences.

[0290] A goal of effective oligonucleotide design is to maximize detection and minimize off-target hybridization, without introducing any biases (e.g., skewing the amplification products to over- or under-represent targets). Primer3 allows for the selection of the binding sequence on the basis of melting temperature (Tm), primer length, and 3′-end stability, which was considered when designing each primer set. Calculating the melting temperature and performing thermodynamic modelling for estimating the propensity of oligonucleotides to hybridize with other oligonucleotides or to hybridize at unintended sites in the genome offer an accurate approach for predicting the energetic stability of DNA structures. For example, because of electronic effects of nucleobase stacking, the stability of 5′-CT-3′ hybridized to 3′-GA-5′ is different from that of 5′-CA-3′ hybridized to 3′-GT-5′, despite the base pairings C:G and T:A are the same. It is recommended to perform oligonucleotides analysis with sophisticated modelling capabilities to capture such electronic effects. Additionally, in silico validation of oligonucleotides may be useful. The online software OligoAnalyzer™ Tool provides information on secondary structure and the possibility of self- or heterodimer formation by the oligonucleotides sequence itself by calculating the Gibbs free energy (AG).

[0291] The design further stipulated that the feet of each probe (i.e., the hybridization sequences) must have a maximum overlap of 8 bp with each other and with the probe backbone, ensuring structural stability and minimizing non-specific interactions. Probes were specifically targeted to exonic regions, excluding any intronic sequences to focus on mature mRNA transcripts and avoid potential complications from unspliced pre-mRNA. This approach differs from alternative probes described in the literature and commercially available, which includes intronic sequences in their target binding regions.

[0292] Spacing between probe binding sequences is another complicated design consideration. Regular spacing (tiling) is the most common approach because it is easy to implement, but it does not ensure optimal positioning of probes. The geometry of folded conformations of a given RNA around the target sequence can impair the binding of a probe. The folding of RNA is a unimolecular process occurring spontaneously in situ, dependent upon the pairing of self-complementary stretches of different regions of an RNA molecule which produces a number of different secondary structures. Consequently, predictions and experimental validation of secondary structures of RNA are useful for selecting target elements.

[0293] To ensure high specificity, we required that the probes exhibit zero off-target hits. Off-target hits were defined using a refined approach: instead of merely counting base pairs matched in each foot, we used the predicted melting temperature (Tm) of the off-target alignment for each foot and enforced a minimum difference between the maximum off-target Tm and the maximum on-target Tm across the two feet for each probe. The true on-target Tm may be higher, but we set a maximum off-target Tm of 40° C. and an on-target Tm of 50° C. to ensure specificity. Using BLAST against the RefSeq RNA database with an E-value cutoff of 100, we refined our off-target definition to include a 3 bp cross-junction requirement, which potentially leads to false-negatives but ensures rigorous specificity. Additional cross checks against GENCODE, RefSeq, or CHESS databases can also be performed. With these parameters, we can generate at least one probe for all genes in our colon panel, optimizing both the specificity and efficiency of our probe design. In embodiments, we generate at least 3 probes per gene. In embodiments, we generate 3, 4, 5, 6, 7, 8, 9, 10, 11, or 12 probes per gene.

[0294] Each respective code-foot serves two purposes, binding to a specific target sequence, and following circularization, each code-foot may be detected to provide an identifier for the target sequence. The oligonucleotide probes used herein must satisfy two purposes: (1) specifically bind to a target nucleic acid molecule including a target sequence and (2) maintain dissimilarity between all other binding sequences to uniquely identify the target nucleic acid molecule. Regarding the first goal, designing target binding regions with a high melting temperature (Tm) alone is not sufficient. The geometry of folded RNA conformations around the target sequence can hinder probe binding. RNA folding is a spontaneous, unimolecular process, involving the pairing of self-complementary regions of the RNA molecule, which produces various secondary structures. Therefore, accurate predictions of RNA secondary structures are essential for selecting target sequences that are suitable for probe design. Further, to enable identification of unique targets the resulting sequences should be designed to include orthogonality (e.g., ensuring a particular Hamming distance) to increase the accuracy of target identification. The Hamming Distance between two sequences (i.e., the number of nucleotides that must be switched to convert one barcode sequence into another) is a useful concept in understanding the behaviors of these encoding schemes. Increasing the minimum Hamming Distance between used sequences by leaving more possible sequences unassigned will produce even larger reductions in a misidentification rate

[0295] To demonstrate colon specific multi-modal G4X data output, we used a colon-focused panel comprising 155 genes and 8 protein targets to highlight intricate crypt structures in normal human colon (FIGS. 4A-B). Even with this small panel we observed a mean of 99 transcripts and 29 unique genes per cell. We applied supervised hierarchical clustering of transcript-only data to patterns from known cell types. When overlaid as cell-type specific pseudocolors on the fH&E morphology channel, cell type locations relative to crypt structures were as expected (FIG. 4C). When visualized as individual cell type channels, these closely approximated the distribution of several cell-type specific protein channels. Taken together, the data indicates: 1) existing spatial platforms (G4X) can identify regional differences in expression patterns of normal colon vs. UC, 2) the G4X produces single-cell resolution transcript data from colon and, 3) the G4X delivers robust multi-modal data where transcript-based cell typing corresponds as expected to that of morphology and proteins.

[0296] We further developed the colon probe panel, designed with stringent constraints to ensure high specificity and efficiency. Each probe consists of two code-feet having a GC content of 45-65% and do not contain four consecutive guanines (Gs) or cytosines (Cs), minimizing secondary structures and non-specific binding. The probes target exonic regions, excluding intronic sequences to focus on mature mRNA transcripts. We ensured zero off-target hits by defining off-targets based on predicted melting temperatures (Tm) and requiring a minimum difference between the maximum off-target Tm and the maximum on-target Tm across the two feet of each probe. See FIG. 3 for an example of the workflow. Using these stringent criteria, we achieved a maximum off-target Tm of 40° C. and an on-target Tm of 50° C., allowing us to generate at least one probe for all genes in our panel. This approach ensures reliable and accurate detection of target gene sequences, crucial for advancing cancer research and therapy. For some genes we purposely designed fewer than 24 probes, this was based on empirical data showing that these genes are extremely abundant in some cell types, leading to optical density issues. For other genes, the natural sequence diversity did not allow us to design 24 probes within our design constraints (e.g., GC content, Hamming Distance). The probes provided herein, for example in the sequence listing and incorporated herein, discloses the 5′ code-foot and the 3′ code-foot useful for targeting particular gene targets: ACKR1, ACKR4, ACSS3, ACTA2, ADIPOQ, ANGPT2, ANKRD29, ANO1, ANXA1, ANXA13, APC, AQP1, AQP3, BEST2, BEST4, BRAF, CA2, CA7, CAMK2N1, CAVIN2, CCK, CCL2, CCL20, CCL3, CCL4, CCL5, CCR2, CCR5, CCR7, CD14, CD163, CD19, CD1C, CD2, CD247, CD27, CD274, CD276, CD28, CD33, CD34, CD36, CD38, CD3D, CD3E, CD4, CD40, CD40LG, CD44, CD47, CD68, CD70, CD74, CD79A, CD80, CD86, CD8A, CDC25C, CDH1, CDH19, CDX2, CEACAM1, CEACAM5, CEACAM8, CENPK, CHGA, CHRM2, CKB, CLCA1, CLCA4, CLDN1, CLDN3, CLDN4, CLEC9A, CLU, CNTNAP2, COL1A1, CPB1, CSF1R, CSPG4, CTLA4, CTNNA2, CTNNB1, CTSS, CX3CL1, CX3CR1, CXCL10, CXCL11, CXCL13, CXCL9, CXCR3, CXCR4, CXCR5, CXCR6, CYP1A1, CYP2A6, DDIT4, DEFA5, DES, DGKG, DPT, DSP, EGFR, ELF3, EOMES, EPCAM, EPHB3, ERBB2, ESM1, FABP1, FAM210B, FAP, FAS, FASN, FBLN1, FBN1, FCAR, FCGR1A, FCGR3A, FGB, FGFR4, FN1, FOXP3, FSCN1, FZD7, GATA3, GATM, GIP, GNLY, GPC1, GPR183, GPRC5A, GPX2, GREM1, GREM2, GRHL1, GUCA2A, GZMA, GZMB, GZMH, GZMK, HAVCR2, HLA-A, HLA-DRA, HNF4A, HOXD8, ICOSLG, ID2, IDO1, IER3, IFNG, IGFBP7, IGHA1, IGHD, IGHG1, IGHM, IL10, IL10RA, IL17A, IL18R1, IL1B, IL2RA, IL2RB, IL6, IL7R, INS, IRF1, ITGAM, ITGAX, ITGB2, ITLN1, JAK3, JCHAIN, KDR, KIT, KLF1, KLRB1, KLRD1, KLRF1, KLRK1, KRAS, KRT20, LAG3, LAMC3, LARS1, LGR5, LPL, LTBP2, LUM, LYVE1, LYZ, MADCAM1, MAPK1, MET, MKI67, MLN, MMP1, MMRN1, MMRN2, MRC1, MS4A1, MUC1, MUC12, MUC2, MUC5B, MUC6, MYC, MYH11, NCAM1, NCR1, NEUROD1, NEUROG3, NKG7, NONO, NOVA1, NRXN1, NTS, ODC1, OLFM4, PAX2, PDCD1, PDCD1LG2, PDE4A, PDGFRA, PDGFRB, PDK4, PECAMI, PHGR1, PIM1, PLAT, PLIN1, PLXND1, POLD2, POLR2A, PON2, POSTN, POU2AF1, POU2F3, PPARG, PRDM1, PRF1, PROM1, PROX1, PTGS2, PYGB, PYY, RARRES1, RBP2, REG1A, REG4, RGMB, RGS5, ROBO1, ROBO2, RRM2, RSPO3, RUNX1, S100A9, S100P, SCGN, SDC1, SELE, SELL, SETD5, SH2D6, SKA3, SLC16A1, SLC2A1, SLC3A2, SLC6A19, SLC7A5, SMOC2, SNCA, SNCG, SOX10, SPINK4, SST, ST14, STAT1, STAT3, STAT4, STC1, SYTL2, TAGLN, TAP1, TAP2, TBX21, TCF7, TCL1A, TFF3, TFP1, TGFB1, THBS1, THY1, TICRR, TIGIT, TLR2, TLR4, TLR9, TNF, TNFRSF17, TNFRSF4, TNFRSF9, TNFSF13B, TNFSF9, TOP2A, TP53, TPH1, TSPAN8, VCAM1, VCAN, VEGFA, VIM, VWF, WARS1, WNT2B, WNT5B, and ZNF800.

[0297] In embodiments, the nucleic acid molecule is an RNA molecule and the oligonucleotide probe is designed to bind an exon of the RNA molecule. By targeting exonic sequences, the probes preferentially hybridize to mature, fully processed messenger RNA transcripts rather than to unspliced pre-mRNA or intronic regions. The probes may be configured as dual-hybridization probes, such as code-probes or padlock probes, in which a first hybridization sequence binds to a first exonic region of the transcript and a second hybridization sequence binds to an adjacent exonic region. Upon hybridization of both sequences, the probe may be ligated to form a circular oligonucleotide, which can subsequently undergo rolling circle amplification to generate an amplification product detectable by sequencing or fluorescent readout. In embodiments, the probe set include multiple probes per exon or across multiple exons of the same transcript to increase capture efficiency and improve sensitivity for low-abundance targets. In other embodiments, probes are specifically designed to overlap splice junctions, enabling detection of particular splice isoforms relevant to IBD pathogenesis. For example, detection of isoform-specific transcripts of IL23R, IL6R, or FOXP3 may provide additional clinical utility in stratifying ulcerative colitis versus Crohn's disease.

[0298] In embodiments, each of the hybridization sequences of the oligonucleotide probe includes a GC content of about 45% to about 65%. In embodiments, each probe sequence including a first segment and a second segment, each segment including computationally derived characters corresponding to 15 to 20 nucleotides; selecting from the plurality a first subset of probe sequences wherein each segment is complementary to a sequence of the target gene; and selecting, from the first subset, a second subset of probe sequences including: 45% to 65% guanine and/or cytosine nucleotides; no more than four consecutive guanine or cytosine nucleotides; and a predicted melting temperature of greater than 50° C. when forming a duplex with the sequence of the target gene.

[0299] The oligonucleotide probes can also be ranked or selected in the methods based on any mathematical combination of two or more nucleotide identities. For example, and not by way of limitation, probes can be ranked and/or selected based on the percentage or fraction of bases that are either guanine or cytosine (“G+C %”) or, alternatively, based on the percentage or fraction of bases that are either adenine or thymine (“A+T”). In another embodiment, oligonucleotide probes can be ranked or selected according to a differential between the percent or fraction of two or more nucleotide identities, such as the difference between the percent or fraction of bases in a probe that are adenine and the percent or fraction of bases that are cytosine (“A<C %”). In embodiments, oligonucleotide probes are ranked and/or selected to retain the number of G and C bases within a preferred range of 40% to 70% of the binding sequence. In particular, it is already well known in the art that guanine-cytosine base pairs have a higher stability than do adenine-thymine base pairs and, further, that many guanine containing mismatches have a higher stability than do non-guanine containing mismatches (see, e.g., SantaLucia, 1998, Proc. Natl. Acad. Sci. U.S.A. 95:1460-1465). As a result, although the percentage of guanine-cytosine base pairs is therefore somewhat correlated with the perfect match duplex binding energy discussed above, high number of guanine-cytosine base pairs are also correlated with higher levels of cross-hybridization. Preferably the percentage of G-C base pairs is between 0 and 75%, more preferably between 0 and 55%, and still more preferably between 8 and 45%.

[0300] In embodiments, the method includes removing from the first subset any probe sequence including a region complementary to a sequence in a transcriptome database. In embodiments, a homology search method such as BLAST (“Basic Local Alignment Search Tool”) and PowerBLAST (see, in particular, Altschul et al., 1990, J. Mol. Biol. 215:403-410; Altschul, 1997, Nucleic Acids Res. 25:3389-3402; and Zhang and Madden, 1997, Genome Res. 7:649-656) are performed against each probe sequence to identify polynucleotides, e.g., in a database of expressed sequences such as the GenBank or the dbEST database, which comprises sequences that are most identical or homologous to each probe's complementary sequence. For example, in embodiments, sequences which are at least 50%, 60%, 70%, 80%, 90%, 95%, or 99% identical to a probe's target sequence are identified using a search algorithm such as BLAST or PowerBLAST according to its default parameters. Preferably the search algorithm is employed using parameters set to detect perfect-match sequences of a seed length of, e.g., 7 to 15 or, more preferably, 7 to 12 bases. Binding energies and binding specificity are then evaluated only for polynucleotide sequences identified in such searches. Any probe sequences that have a match identified in a database may then be discarded.

[0301] The code probes additionally include a backbone which includes a sequencing primer binding sequence. In this manner, sets of probes may be combined to facilitate multiple rounds of detection. Herein we provide orthogonal sequencing primer sequences which may be included in the backbone of the code probe. For example, a first subset of probes may detect RRM2, VCAM1, S100P, and PROM1 wherein each probe includes the SP1 sequence. Following detection of the first subset, a second subset of probes may be used to detect IL1B, SOX1G, SOX1G, and EPCAM wherein each probe in the second subset includes the SP5 sequence in the backbone. To enable greater detection, the code-foot sequences for the probe targeting ABCG2 (e.g., SEQ ID NO:1 and SEQ ID NO:5710) in the first subset may be different in the second subset (e.g., SEQ ID NO: 17 and SEQ ID NO:5726). In embodiments, the backbone may include a supplemental error corrected barcode (ECB) to further facilitate multiplexing.

SEQUENCING PRIMER TABLE

| Sequencing | Sequencing primer | |
|---|---|---|
| Primer | sequence (5′ to 3′) | |
| SP1 | CCACAGGAAGTAAAGCACA | SEQ ID |
| | CTCTTTCCCTACACGACGC | NO: 10531 |
| | TCTTCCGATC | |
| SP2 | CCACAGGAAGTAAAGCCAC | SEQ ID |
| | AACGGGAGCTGTGGAATTG | NO: 10532 |
| | GTTCACCTGG | |
| SP3 | CCACAGGAAGTAAAGCGTA | SEQ ID |
| | TGATGGTGTTGCGGCTTCT | NO: 10533 |
| | CGCTTAACGC | |
| SP4 | CCACAGGAAGTAAAGCTGT | SEQ ID |
| | TGCATCTCCACCCGGATTG | NO: 10534 |
| | AGCCTTCAGC | |
| SP5 | CCACAGGAAGTAAAGCTGG | SEQ ID |
| | ACTAAGACTCGTCCTCCAG | NO: 10535 |
| | CGGACCTAAG | |
| SP6 | CCACAGGAAGTAAAGCTCG | SEQ ID |
| | GCGTTGTCTGCTATCGTTC | NO: 10536 |
| | TTGGCACTCC | |
| SP7 | ACACTCTTTCCCTACACGA | SEQ ID |
| | CGCTCTTCCGATC | NO: 10537 |
| SP8 | TCGGCGTTGTCTGCTATCG | SEQ ID |
| | TTCTTGGCACTCC | NO: 10538 |
| SP9 | CACAACGGGAGCTGTGGAA | SEQ ID |
| | TTGGTTCACCTGG | NO: 10539 |
| SP10 | TGTTGCATCTCCACCCGGA | SEQ ID |
| | TTGAGCCTTCAGC | NO: 10540 |
| SP11 | TGGACTAAGACTCGTCCTC | SEQ ID |
| | CAGCGGACCTAAG | NO: 10541 |
| SP12 | TACGACACACTCGGGCTCT | SEQ ID |
| | ATGGGCTTCATGG | NO: 10542 |
| SP13 | GTATGATGGTGTTGCGGCT | SEQ ID |
| | TCTCGCTTAACGC | NO: 10543 |
| SP14 | TCTTGAGTCATTCGCAGGG | SEQ ID |
| | CATGTGCCAGACC | NO: 10544 |

[0302] Controls. The National Institute of Standards and Technology (NIST) developed the External RNA Controls Consortium (ERCC) to derive universal references. The ERCC assembled a sequence library of 176 DNA sequences that could be transcribed into RNA to serve as controls in systems used to measure gene expression. These controls were cataloged as ERCC-00001 through ERCC-00176, and are collectively referred to as ERCC controls. We designed probes to be specific to some ERCC probes, enabling the detection of false-positive ERCC probes.

What is claimed is:

1. A probe panel comprising a plurality of oligonucleotide probes, wherein each oligonucleotide probe comprises:
a first hybridization sequence designed to specifically bind to a first target sequence of an RNA molecule and a second hybridization sequence designed to specifically bind to a second target sequence of the RNA molecule,
wherein the probe panel is configured to detect at least 25 RNA molecules associated with inflammatory bowel disease (IBD).

2. The probe panel of claim 1, wherein the probe panel is configured to detect a a sequence corresponding to a gene selected from the group consisting of TNF, IL1B, IL6, IL17A, IL10, IL10RA, IL23R, IFNG, CXCL9, CXCL10, CXCL11, CXCR3, CCR7, CD3E, CD4, CD8A, FOXP3, CD68, MS4A1, ICOSLG, MUC2, CLDN1, EPCAM, CEACAM5, KRT20, COL1A1, TGFB1, and VCAM1.

3. The probe panel of claim 1, wherein the probe panel is configured to detect a sequence corresponding to a gene selected from the group consisting of ACKR1, ACKR4, ACSS3, ACTA2, ADIPOQ, ANGPT2, ANKRD29, ANO1, ANXA1, ANXA13, APC, AQP1, AQP3, BEST2, BEST4, BRAF, CA2, CA7, CAMK2N1, CAVIN2, CCK, CCL2, CCL20, CCL3, CCL4, CCL5, CCR2, CCR5, CCR7, CD14, CD163, CD19, CD1C, CD2, CD247, CD27, CD274, CD276, CD28, CD33, CD34, CD36, CD38, CD3D, CD3E, CD4, CD40, CD40LG, CD44, CD47, CD68, CD70, CD74, CD79A, CD80, CD86, CD8A, CDC25C, CDH1, CDH19, CDX2, CEACAM1, CEACAM5, CEACAM8, CENPK, CHGA, CHRM2, CKB, CLCA1, CLCA4, CLDN1, CLDN3, CLDN4, CLEC9A, CLU, CNTNAP2, COL1A1, CPB1, CSF1R, CSPG4, CTLA4, CTNNA2, CTNNB1, CTSS, CX3CL1, CX3CR1, CXCL10, CXCL11, CXCL13, CXCL9, CXCR3, CXCR4, CXCR5, CXCR6, CYP1A1, CYP2A6, DDIT4, DEFA5, DES, DGKG, DPT, DSP, EGFR, ELF3, EOMES, EPCAM, EPHB3, ERBB2, ESM1, FABP1, FAM210B, FAP, FAS, FASN, FBLN1, FBN1, FCAR, FCGR1A, FCGR3A, FGB, FGFR4, FN1, FOXP3, FSCN1, FZD7, GATA3, GATM, GIP, GNLY, GPC1, GPR183, GPRC5A, GPX2, GREM1, GREM2, GRHL1, GUCA2A, GZMA, GZMB, GZMH, GZMK, HAVCR2, HLA-A, HLA-DRA, HNF4A, HOXD8, ICOSLG, ID2, IDO1, IER3, IFNG, IGFBP7, IGHA1, IGHD, IGHG1, IGHM, IL10, IL10RA, IL17A, IL18R1, IL1B, IL2RA, IL2RB, IL6, IL7R, INS, IRF1, ITGAM, ITGAX, ITGB2, ITLN1, JAK3, JCHAIN, KDR, KIT, KLF1, KLRB1, KLRD1, KLRF1, KLRK1, KRAS, KRT20, LAG3, LAMC3, LARS1, LGR5, LPL, LTBP2, LUM, LYVE1, LYZ, MADCAM1, MAPK1, MET, MKI67, MLN, MMP1, MMRN1, MMRN2, MRC1, MS4A1, MUC1, MUC12, MUC2, MUC5B, MUC6, MYC, MYH11, NCAM1, NCR1, NEUROD1, NEUROG3, NKG7, NONO, NOVA1, NRXN1, NTS, ODC1, OLFM4, PAX2, PDCD1, PDCD1LG2, PDE4A, PDGFRA, PDGFRB, PDK4, PECAMI, PHGR1, PIM1, PLAT, PLIN1, PLXND1, POLD2, POLR2A, PON2, POSTN, POU2AF1, POU2F3, PPARG, PRDM1, PRF1, PROM1, PROX1, PTGS2, PYGB, PYY, RARRES1, RBP2, REG1A, REG4, RGMB, RGS5, ROBO1, ROBO2, RRM2, RSPO3, RUNX1, S100A9, S100P, SCGN, SDC1, SELE, SELL, SETD5, SH2D6, SKA3, SLC16A1, SLC2A1, SLC3A2, SLC6A19, SLC7A5, SMOC2, SNCA, SNCG, SOX10, SPINK4, SST, ST14, STAT1, STAT3, STAT4, STC1, SYTL2, TAGLN, TAP1, TAP2, TBX21, TCF7, TCL1A, TFF3, TFP1, TGFB1, THBS1, THY1, TICRR, TIGIT, TLR2, TLR4, TLR9, TNF, TNFRSF17, TNFRSF4, TNFRSF9, TNFSF13B, TNFSF9, TOP2A, TP53, TPH1, TSPAN8, VCAM1, VCAN, VEGFA, VIM, VWF, WARS1, WNT2B, WNT5B, and ZNF800.

4. A method for detecting a nucleic acid molecule in a tissue, said method comprising:
immobilizing a tissue to a solid support, wherein the tissue comprises a nucleic acid molecule and is selected from colon tissue, rectal tissue, ileal tissue, small intestine tissue, gastric tissue, esophageal tissue, perianal tissue, fibrotic tissue, and granulomatous tissue;
contacting the tissue with an oligonucleotide probe, wherein said oligonucleotide probe comprises a first hybridization sequence and a second hybridization sequence;
hybridizing the first hybridization sequence to the nucleic acid molecule and hybridizing the second hybridization sequence to the nucleic acid molecule;
ligating the first hybridization sequence to the second hybridization sequence to form a circular polynucleotide;
amplifying the circular polynucleotide to form an amplification product; and
sequencing a sequence of the amplification product.

5. The method of claim 4, further comprising detecting the nucleic acid molecule by identifying the first hybridization sequence, the second hybridization sequence, or both the first and second hybridization sequences.

6. The method of claim 4, wherein the oligonucleotide probe further comprises a barcode sequence.

7. The method of claim 4, wherein the nucleic acid molecule comprises a gene sequence corresponding to a gene selected from the group consisting of ACKR1, ACKR4, ACSS3, ACTA2, ADIPOQ, ANGPT2, ANKRD29, ANO1, ANXA1, ANXA13, APC, AQP1, AQP3, BEST2, BEST4, BRAF, CA2, CA7, CAMK2N1, CAVIN2, CCK, CCL2, CCL20, CCL3, CCL4, CCL5, CCR2, CCR5, CCR7, CD14, CD163, CD19, CD1C, CD2, CD247, CD27, CD274, CD276, CD28, CD33, CD34, CD36, CD38, CD3D, CD3E, CD4, CD40, CD40LG, CD44, CD47, CD68, CD70, CD74, CD79A, CD80, CD86, CD8A, CDC25C, CDH1, CDH19, CDX2, CEACAM1, CEACAM5, CEACAM8, CENPK, CHGA, CHRM2, CKB, CLCA1, CLCA4, CLDN1, CLDN3, CLDN4, CLEC9A, CLU, CNTNAP2, COL1A1, CPB1, CSF1R, CSPG4, CTLA4, CTNNA2, CTNNB1, CTSS, CX3CL1, CX3CR1, CXCL10, CXCL11, CXCL13, CXCL9, CXCR3, CXCR4, CXCR5, CXCR6, CYP1A1, CYP2A6, DDIT4, DEFA5, DES, DGKG, DPT, DSP, EGFR, ELF3, EOMES, EPCAM, EPHB3, ERBB2, ESM1, FABP1, FAM210B, FAP, FAS, FASN, FBLN1, FBN1, FCAR, FCGR1A, FCGR3A, FGB, FGFR4, FN1, FOXP3, FSCN1, FZD7, GATA3, GA™, GIP, GNLY, GPC1, GPR183, GPRC5A, GPX2, GREM1, GREM2, GRHL1, GUCA2A, GZMA, GZMB, GZMH, GZMK, HAVCR2, HLA-A, HLA-DRA, HNF4A, HOXD8, ICOSLG, ID2, IDO1, IER3, IFNG, IGFBP7, IGHA1, IGHD, IGHG1, IGHM, IL10, IL10RA, IL17A, IL18R1, IL1B, IL2RA, IL2RB, IL6, IL7R, INS, IRF1, ITGAM, ITGAX, ITGB2, ITLN1, JAK3, JCHAIN, KDR, KIT, KLF1, KLRB1, KLRD1, KLRF1, KLRK1, KRAS, KRT20, LAG3, LAMC3, LARS1, LGR5, LPL, LTBP2, LUM, LYVE1, LYZ, MADCAM1, MAPK1, MET, MKI67, MLN, MMP1, MMRN1, MMRN2, MRC1, MS4A1, MUC1, MUC12, MUC2, MUC5B, MUC6, MYC, MYH11, NCAM1, NCR1, NEUROD1, NEUROG3, NKG7, NONO, NOVA1, NRXN1, NTS, ODC1, OLFM4, PAX2, PDCD1, PDCD1LG2, PDE4A, PDGFRA, PDGFRB, PDK4, PECAMI, PHGR1, PIM1, PLAT, PLIN1, PLXND1, POLD2, POLR2A, PON2, POSTN, POU2AF1, POU2F3, PPARG, PRDM1, PRF1, PROM1, PROX1, PTGS2, PYGB, PYY, RARRES1, RBP2, REG1A, REG4, RGMB, RGS5, ROBO1, ROBO2, RRM2, RSPO3, RUNX1, S100A9, S100P, SCGN, SDC1, SELE, SELL, SETD5, SH2D6, SKA3, SLC16A1, SLC2A1, SLC3A2, SLC6A19, SLC7A5, SMOC2, SNCA, SNCG, SOX10, SPINK4, SST, ST14, STAT1, STAT3, STAT4, STC1, SYTL2, TAGLN, TAP1, TAP2, TBX21, TCF7, TCL1A, TFF3, TFP1, TGFB1, THBS1, THY1, TICRR, TIGIT, TLR2, TLR4, TLR9, TNF, TNFRSF17, TNFRSF4, TNFRSF9, TNFSF13B, TNFSF9, TOP2A, TP53, TPH1, TSPAN8, VCAM1, VCAN, VEGFA, VIM, VWF, WARS1, WNT2B, WNT5B, and ZNF800.

8. The method of claim 4, wherein the nucleic acid molecule comprises a gene sequence corresponding to a gene selected from the group consisting of TNF, IL1B, IL6, IL17A, IL10, IL10RA, IL23R, IFNG, CXCL9, CXCL10, CXCL11, CXCR3, CCR7, CD3E, CD4, CD8A, FOXP3, CD68, MS4A1, ICOSLG, MUC2, CLDN1, EPCAM, CEACAM5, KRT20, COL1A1, TGFB1, and VCAM1.

9. The method of claim 4, wherein the amplification product is generated by rolling circle amplification.

10. The method of claim 4, wherein the nucleic acid molecule is an RNA molecule and the oligonucleotide probe is designed to bind an exon of the RNA molecule.

11. The method of claim 4, further comprising binding a specific binding reagent comprising an oligonucleotide to a protein in the tissue, binding a circularizable oligonucleotide to the oligonucleotide, circularizing the circularizable oligonucleotide to form a second circular polynucleotide, amplifying the second circular polynucleotide to form a second amplification product; and detecting the amplification product.

12. The method of claim 11, wherein the specific binding reagent is selected from an antibody, single-chain Fv fragment (scFv), antibody fragment antigen-binding (Fab), or an aptamer.

13. The method of claim 4, further comprising contacting the tissue with a stain.

14. The method of claim 4, further comprising detecting a CDR3 sequence in the tissue, wherein detecting the CDR3 sequence comprises:
(i) contacting the tissue with a polynucleotide probe and hybridizing a first end of the polynucleotide probe to a first sequence of the nucleic acid molecule, and hybridizing a second end of the polynucleotide probe to a second sequence of the nucleic acid molecule, wherein said nucleic acid molecule comprises the CDR3 sequence between the first sequence and the second sequence;
(ii) extending the polynucleotide probe along the CDR3 sequence to generate a complement of the CDR3 sequence, and ligating the complement of the CDR3 sequence to the polynucleotide probe thereby forming a circular oligonucleotide; and
(iii) sequencing the circular oligonucleotide, or a complement thereof.

15. A method of detecting nucleic acid molecules in a tissue sample from a patient having or suspected of having inflammatory bowel disease (IBD), the method comprising:
i) contacting the tissue sample with a first polynucleotide probe and binding said first polynucleotide probe to a first nucleic acid molecule, and contacting the sample with a second polynucleotide probe and binding said second polynucleotide probe to a second nucleic acid molecule, wherein said first polynucleotide probe comprises a first oligonucleotide binding sequence and a first sequence, and wherein said second polynucleotide probe comprises a second oligonucleotide binding sequence and a second sequence;
ii) amplifying the first and second polynucleotide probes to generate amplification products;
iii) hybridizing a first oligonucleotide to the first hybridization sequence and detecting a series of fluorescent signals associated with the first sequence to determine the first nucleic acid molecule and a location of the first nucleic acid molecule, followed by hybridizing a second oligonucleotide to the second oligonucleotide binding sequence, and detecting a series of fluorescent signals associated with the second sequence to determine the second nucleic acid molecule and a location of the second nucleic acid molecule, wherein the first oligonucleotide and the second oligonucleotide comprise different sequences; and
iv) generating an image of the tissue sample comprising indicia data corresponding to the locations of the first and second nucleic acid molecules.

16. The method of claim 15, further comprising identifying the patient as having inflammatory bowel disease (IBD) when the indicia data in the generated image of the tissue sample comprises a spatial pattern of gene expression associated with IBD.

17. A solid support comprising a plurality of discrete tissue samples obtained from a patient having or suspected of having inflammatory bowel disease (IBD),
wherein each tissue sample is selected from colon tissue, rectal tissue, ileal tissue, small intestine tissue, gastric tissue, esophageal tissue, perianal tissue, fibrotic tissue, or granulomatous tissue;
wherein each tissue sample comprises: (i) an RNA molecule hybridized to an oligonucleotide probe, the RNA molecule comprising a sequence of an IBD-associated gene; and (ii) a protein bound to a specific binding reagent, the protein being an IBD-associated protein.

18. The solid support of claim 17, wherein the RNA molecule comprises a sequence of a gene selected from the group consisting of TNF, IL1B, IL6, IL17A, IFNG, IL10, FOXP3, CXCL9, CXCL10, and MUC2.

19. The solid support of claim 17, wherein the RNA molecule and the protein are co-localized within a cell of the tissue sample.

20. The solid support of claim 18, wherein the protein is selected from the group consisting of CD3E, CD4, CD8A, FOXP3, CD68, MS4A1, EPCAM, and PDCD1.

The application's sequence listing, which the Patent Office published only in electronic form, follows.

SEQUENCE LISTING (10544 sequences)

SEQ ID NO: 1 - DNA, 20 bp, synthetic construct
  source 1..20: mol_type = other DNA
agacacagtagcccaggcta

SEQ ID NO: 2 - DNA, 20 bp, synthetic construct
  source 1..20: mol_type = other DNA
ccataggaagaattccatac

SEQ ID NO: 3 - DNA, 20 bp, synthetic construct
  source 1..20: mol_type = other DNA
gctgtctttttgtcccattc

SEQ ID NO: 4 - DNA, 20 bp, synthetic construct
  source 1..20: mol_type = other DNA
gcagagctaatagcagtaga

SEQ ID NO: 5 - DNA, 20 bp, synthetic construct
  source 1..20: mol_type = other DNA
ggtgatcagttggtgtcatg

SEQ ID NO: 6 - DNA, 20 bp, synthetic construct
  source 1..20: mol_type = other DNA
gctagcaccttcttttctag

SEQ ID NO: 7 - DNA, 20 bp, synthetic construct
  source 1..20: mol_type = other DNA
cctcacgtcgctgaataatt

SEQ ID NO: 8 - DNA, 20 bp, synthetic construct
  source 1..20: mol_type = other DNA
acacagtctatgtggccagc

SEQ ID NO: 9 - DNA, 20 bp, synthetic construct
  source 1..20: mol_type = other DNA
tgaaggtcagcttttcagtc

SEQ ID NO: 10 - DNA, 20 bp, synthetic construct
  source 1..20: mol_type = other DNA
atcccaggcacttgcgcagg

SEQ ID NO: 11 - DNA, 20 bp, synthetic construct
  source 1..20: mol_type = other DNA
atgcagagcagacagatgca

SEQ ID NO: 12 - DNA, 20 bp, synthetic construct
  source 1..20: mol_type = other DNA
tcaagtcgatgttgctgtcc

SEQ ID NO: 13 - DNA, 20 bp, synthetic construct
  source 1..20: mol_type = other DNA
gtgtgggcgctgaccttgcg

SEQ ID NO: 14 - DNA, 20 bp, synthetic construct
  source 1..20: mol_type = other DNA
atgttgctgctgttcatcat

SEQ ID NO: 15 - DNA, 20 bp, synthetic construct
  source 1..20: mol_type = other DNA
acaaaaggtggaaatgaggc

SEQ ID NO: 16 - DNA, 20 bp, synthetic construct
  source 1..20: mol_type = other DNA
ttggccttcctcttggccgt

SEQ ID NO: 17 - DNA, 20 bp, synthetic construct
  source 1..20: mol_type = other DNA
gccaaagcaaatggcacaga

SEQ ID NO: 18 - DNA, 20 bp, synthetic construct
  source 1..20: mol_type = other DNA
ggtgagaaaccgttcaggta

SEQ ID NO: 19 - DNA, 20 bp, synthetic construct
  source 1..20: mol_type = other DNA
cttagccgcgatggtctcat

SEQ ID NO: 20 - DNA, 20 bp, synthetic construct
  source 1..20: mol_type = other DNA
cacttcatgctgctgctgtg

SEQ ID NO: 21 - DNA, 20 bp, synthetic construct
  source 1..20: mol_type = other DNA
tgttcatgatgctgtatggg

SEQ ID NO: 22 - DNA, 20 bp, synthetic construct
  source 1..20: mol_type = other DNA
acggaagtctggagtatcac

SEQ ID NO: 23 - DNA, 20 bp, synthetic construct
  source 1..20: mol_type = other DNA
tcaaattcacccacccatca

SEQ ID NO: 24 - DNA, 20 bp, synthetic construct
  source 1..20: mol_type = other DNA
cccacaagttcccaatctga

SEQ ID NO: 25 - DNA, 20 bp, synthetic construct
  source 1..20: mol_type = other DNA
gcagtccaccgcataattat

SEQ ID NO: 26 - DNA, 20 bp, synthetic construct
  source 1..20: mol_type = other DNA
tgttctgaccctggcatatc

SEQ ID NO: 27 - DNA, 20 bp, synthetic construct
  source 1..20: mol_type = other DNA
aggcaagcacagcagaggtg

SEQ ID NO: 28 - DNA, 20 bp, synthetic construct
  source 1..20: mol_type = other DNA
ccgtgtctcggcactgctgc

SEQ ID NO: 29 - DNA, 20 bp, synthetic construct
  source 1..20: mol_type = other DNA
ggtcctcttgttcctcctca

SEQ ID NO: 30 - DNA, 20 bp, synthetic construct
  source 1..20: mol_type = other DNA
cttccaactgtgtcaatgca

SEQ ID NO: 31 - DNA, 20 bp, synthetic construct
  source 1..20: mol_type = other DNA
catgatgccgagccgccacc

SEQ ID NO: 32 - DNA, 20 bp, synthetic construct
  source 1..20: mol_type = other DNA
gatcatggagcctcgtgcca

SEQ ID NO: 33 - DNA, 20 bp, synthetic construct
  source 1..20: mol_type = other DNA
acactacacgcccagggctc

SEQ ID NO: 34 - DNA, 20 bp, synthetic construct
  source 1..20: mol_type = other DNA
ggaacacaggcgttttctgc

SEQ ID NO: 35 - DNA, 20 bp, synthetic construct
  source 1..20: mol_type = other DNA
tagcatcaatatgcatggga

SEQ ID NO: 36 - DNA, 20 bp, synthetic construct
  source 1..20: mol_type = other DNA
ggcaatagtcagggcagggc

SEQ ID NO: 37 - DNA, 20 bp, synthetic construct
  source 1..20: mol_type = other DNA
gcgtgggaaacctcgattct

SEQ ID NO: 38 - DNA, 20 bp, synthetic construct
  source 1..20: mol_type = other DNA
gaacagaacaaaggcaatac

SEQ ID NO: 39 - DNA, 20 bp, synthetic construct
  source 1..20: mol_type = other DNA
aaagtctctgatatcggaag

SEQ ID NO: 40 - DNA, 20 bp, synthetic construct
  source 1..20: mol_type = other DNA
aagaaccataccactgtccg

SEQ ID NO: 41 - DNA, 20 bp, synthetic construct
  source 1..20: mol_type = other DNA
acctgatgacatgtacacct

SEQ ID NO: 42 - DNA, 20 bp, synthetic construct
  source 1..20: mol_type = other DNA
ctcccgggatcttgcatttc

SEQ ID NO: 43 - DNA, 20 bp, synthetic construct
  source 1..20: mol_type = other DNA
acttcaataaaccggaacac

SEQ ID NO: 44 - DNA, 20 bp, synthetic construct
  source 1..20: mol_type = other DNA
cagagggtagttaaactcct

SEQ ID NO: 45 - DNA, 20 bp, synthetic construct
  source 1..20: mol_type = other DNA
agattgttgcagcggttctt

SEQ ID NO: 46 - DNA, 20 bp, synthetic construct
  source 1..20: mol_type = other DNA
cgttctcacaggcagagcag

SEQ ID NO: 47 - DNA, 20 bp, synthetic construct
  source 1..20: mol_type = other DNA
gatgaaaggccgctgtacca

SEQ ID NO: 48 - DNA, 20 bp, synthetic construct
  source 1..20: mol_type = other DNA
tcttgacaaccaaggagtga

SEQ ID NO: 49 - DNA, 20 bp, synthetic construct
  source 1..20: mol_type = other DNA
ggatgccaccgagtaggtac

SEQ ID NO: 50 - DNA, 20 bp, synthetic construct
  source 1..20: mol_type = other DNA
agaaggacatgtcaggtggg

SEQ ID NO: 51 - DNA, 20 bp, synthetic construct
  source 1..20: mol_type = other DNA
gtccacgggcgtgactttgt

SEQ ID NO: 52 - DNA, 20 bp, synthetic construct
  source 1..20: mol_type = other DNA
ttgagatcatcactggcttt

SEQ ID NO: 53 - DNA, 20 bp, synthetic construct
  source 1..20: mol_type = other DNA
attgtgttgtcccgtggcca

SEQ ID NO: 54 - DNA, 20 bp, synthetic construct
  source 1..20: mol_type = other DNA
aggtgtgacattactccaga

SEQ ID NO: 55 - DNA, 20 bp, synthetic construct
  source 1..20: mol_type = other DNA
gagcaagatttcctccaggt

SEQ ID NO: 56 - DNA, 20 bp, synthetic construct
  source 1..20: mol_type = other DNA
cctgatcagtcattttttgc

SEQ ID NO: 57 - DNA, 20 bp, synthetic construct
  source 1..20: mol_type = other DNA
agcattcagttctgacacac

SEQ ID NO: 58 - DNA, 20 bp, synthetic construct
  source 1..20: mol_type = other DNA
ctgttttgcaaagagctagt

SEQ ID NO: 59 - DNA, 20 bp, synthetic construct
  source 1..20: mol_type = other DNA
tctagtgctttccaatgttg

SEQ ID NO: 60 - DNA, 20 bp, synthetic construct
  source 1..20: mol_type = other DNA
accaggtcgtccagctcctg

SEQ ID NO: 61 - DNA, 20 bp, synthetic construct
  source 1..20: mol_type = other DNA
tgagcgatttcatcgtcaag

SEQ ID NO: 62 - DNA, 20 bp, synthetic construct
  source 1..20: mol_type = other DNA
gttttgagacaagtcgtagc

SEQ ID NO: 63 - DNA, 20 bp, synthetic construct
  source 1..20: mol_type = other DNA
ctgccatattcagaactttc

SEQ ID NO: 64 - DNA, 20 bp, synthetic construct
  source 1..20: mol_type = other DNA
gactcatcgttgtacatgag

SEQ ID NO: 65 - DNA, 20 bp, synthetic construct
  source 1..20: mol_type = other DNA
ggatgcggaatttcttcagc

SEQ ID NO: 66 - DNA, 20 bp, synthetic construct
  source 1..20: mol_type = other DNA
ccacacatggagtaaagagc

SEQ ID NO: 67 - DNA, 20 bp, synthetic construct
  source 1..20: mol_type = other DNA
ggatgaattcagctgcacaa

SEQ ID NO: 68 - DNA, 20 bp, synthetic construct
  source 1..20: mol_type = other DNA
tggaatggtgatctcagtta

SEQ ID NO: 69 - DNA, 20 bp, synthetic construct
  source 1..20: mol_type = other DNA
ggtgttgacttcattcaggg

SEQ ID NO: 70 - DNA, 20 bp, synthetic construct
  source 1..20: mol_type = other DNA
ctcacaggcaattcttgtcg

SEQ ID NO: 71 - DNA, 20 bp, synthetic construct
  source 1..20: mol_type = other DNA
aattgggtcgggaggatatc

SEQ ID NO: 72 - DNA, 20 bp, synthetic construct
  source 1..20: mol_type = other DNA
ggccatgactcgctcagcag

SEQ ID NO: 73 - DNA, 20 bp, synthetic construct
  source 1..20: mol_type = other DNA
aattgctctggtcacttctc

SEQ ID NO: 74 - DNA, 20 bp, synthetic construct
  source 1..20: mol_type = other DNA
tctccacgtgtttgatggcc

SEQ ID NO: 75 - DNA, 20 bp, synthetic construct
  source 1..20: mol_type = other DNA
caagttcaagtatttctccc

SEQ ID NO: 76 - DNA, 20 bp, synthetic construct
  source 1..20: mol_type = other DNA
tcgagagagggtgttggtca

SEQ ID NO: 77 - DNA, 20 bp, synthetic construct
  source 1..20: mol_type = other DNA
gcctttgttgactgccatcc

SEQ ID NO: 78 - DNA, 20 bp, synthetic construct
  source 1..20: mol_type = other DNA
taaaagcatcattggttggc

SEQ ID NO: 79 - DNA, 20 bp, synthetic construct
  source 1..20: mol_type = other DNA
cctccagtagaaatcctagt

SEQ ID NO: 80 - DNA, 20 bp, synthetic construct
  source 1..20: mol_type = other DNA
ccaaacgtccctcaccttcc

SEQ ID NO: 81 - DNA, 20 bp, synthetic construct
  source 1..20: mol_type = other DNA
tgtgccaagtagtagtgtga

SEQ ID NO: 82 - DNA, 20 bp, synthetic construct
  source 1..20: mol_type = other DNA
acctagaaggcctctacctg

SEQ ID NO: 83 - DNA, 20 bp, synthetic construct
  source 1..20: mol_type = other DNA
tttggttccaccacctttct

SEQ ID NO: 84 - DNA, 20 bp, synthetic construct
  source 1..20: mol_type = other DNA
tttcagtccctcttttgaag

SEQ ID NO: 85 - DNA, 20 bp, synthetic construct
  source 1..20: mol_type = other DNA
tgtccagagataagcagcca

SEQ ID NO: 86 - DNA, 20 bp, synthetic construct
  source 1..20: mol_type = other DNA
cccgaggtttcaaaggtgaa

SEQ ID NO: 87 - DNA, 20 bp, synthetic construct
  source 1..20: mol_type = other DNA
gaaaagtccggtcacgtcac

SEQ ID NO: 88 - DNA, 20 bp, synthetic construct
  source 1..20: mol_type = other DNA
tcccggaactgccaggcttg

SEQ ID NO: 89 - DNA, 20 bp, synthetic construct
  source 1..20: mol_type = other DNA
catacactgcatggtctcca

SEQ ID NO: 90 - DNA, 20 bp, synthetic construct
  source 1..20: mol_type = other DNA
gcatatcttccagaattcct

SEQ ID NO: 91 - DNA, 20 bp, synthetic construct
  source 1..20: mol_type = other DNA
tatagtcactcattcctcct

SEQ ID NO: 92 - DNA, 20 bp, synthetic construct
  source 1..20: mol_type = other DNA
attctccttggtcttggctc

SEQ ID NO: 93 - DNA, 20 bp, synthetic construct
  source 1..20: mol_type = other DNA
tgatctcaccaatgtccacg

SEQ ID NO: 94 - DNA, 20 bp, synthetic construct
  source 1..20: mol_type = other DNA
cttaccaccaaccaccctgg

SEQ ID NO: 95 - DNA, 20 bp, synthetic construct
  source 1..20: mol_type = other DNA
ctccgaatggcgaggaagac

SEQ ID NO: 96 - DNA, 20 bp, synthetic construct
  source 1..20: mol_type = other DNA
gcatgccaacattcaagcct

SEQ ID NO: 97 - DNA, 20 bp, synthetic construct
  source 1..20: mol_type = other DNA
tacagaagcccaaagtgcat

SEQ ID NO: 98 - DNA, 20 bp, synthetic construct
  source 1..20: mol_type = other DNA
ccatcatccgccttgaatgc

SEQ ID NO: 99 - DNA, 20 bp, synthetic construct
  source 1..20: mol_type = other DNA
tctggtccactaggcaggcc

SEQ ID NO: 100 - DNA, 20 bp, synthetic construct
  source 1..20: mol_type = other DNA
aaatccctaagtcactcgcc

SEQ ID NO: 101 - DNA, 20 bp, synthetic construct
  source 1..20: mol_type = other DNA
taacagcctactctgggagc

SEQ ID NO: 102 - DNA, 20 bp, synthetic construct
  source 1..20: mol_type = other DNA
cgggttcattttgcagcgat

SEQ ID NO: 103 - DNA, 20 bp, synthetic construct
  source 1..20: mol_type = other DNA
atcgatttggacatgctgtt

SEQ ID NO: 104 - DNA, 20 bp, synthetic construct
  source 1..20: mol_type = other DNA
agtggactcctgctttgcct

SEQ ID NO: 105 - DNA, 20 bp, synthetic construct
  source 1..20: mol_type = other DNA
ccatcaaaggtcacgatgtg

SEQ ID NO: 106 - DNA, 20 bp, synthetic construct
  source 1..20: mol_type = other DNA
ttgggcatgtttgctatctc

SEQ ID NO: 107 - DNA, 20 bp, synthetic construct
  source 1..20: mol_type = other DNA
acatgcattgcttcagaaga

SEQ ID NO: 108 - DNA, 20 bp, synthetic construct
  source 1..20: mol_type = other DNA
ttagtgtgtacaaggctgaa

SEQ ID NO: 109 - DNA, 20 bp, synthetic construct
  source 1..20: mol_type = other DNA
gcagctggtgatcagggagt

SEQ ID NO: 110 - DNA, 20 bp, synthetic construct
  source 1..20: mol_type = other DNA
gtccataggcatcgtcctca

SEQ ID NO: 111 - DNA, 20 bp, synthetic construct
  source 1..20: mol_type = other DNA
agcttccttgcaatctccct

SEQ ID NO: 112 - DNA, 20 bp, synthetic construct
  source 1..20: mol_type = other DNA
gcccatcattcttggtcact

SEQ ID NO: 113 - DNA, 20 bp, synthetic construct
  source 1..20: mol_type = other DNA
tcctttgcagttttggtcta

SEQ ID NO: 114 - DNA, 20 bp, synthetic construct
  source 1..20: mol_type = other DNA
gttataacagcaggtgactg

SEQ ID NO: 115 - DNA, 20 bp, synthetic construct
  source 1..20: mol_type = other DNA
agaaatactccttgatgtgg

SEQ ID NO: 116 - DNA, 20 bp, synthetic construct
  source 1..20: mol_type = other DNA
gtaagttcaggttcaaggac

SEQ ID NO: 117 - DNA, 20 bp, synthetic construct
  source 1..20: mol_type = other DNA
tttatgacagggagcaccgt

SEQ ID NO: 118 - DNA, 20 bp, synthetic construct
  source 1..20: mol_type = other DNA
acccactcatttgcagcaga

SEQ ID NO: 119 - DNA, 20 bp, synthetic construct
  source 1..20: mol_type = other DNA
gatccaactcaaattccttc

SEQ ID NO: 120 - DNA, 20 bp, synthetic construct
  source 1..20: mol_type = other DNA
atgctgcacgaatacctccc

SEQ ID NO: 121 - DNA, 20 bp, synthetic construct
  source 1..20: mol_type = other DNA
atcgttgcggaacttgacgc

SEQ ID NO: 122 - DNA, 20 bp, synthetic construct
  source 1..20: mol_type = other DNA
tatccagatgcccacacagg

SEQ ID NO: 123 - DNA, 20 bp, synthetic construct
  source 1..20: mol_type = other DNA
taggttgagaccgccggcat

SEQ ID NO: 124 - DNA, 20 bp, synthetic construct
  source 1..20: mol_type = other DNA
gagcgctagggtttacggtg

SEQ ID NO: 125 - DNA, 20 bp, synthetic construct
  source 1..20: mol_type = other DNA
atgcgggattcttttccatt

SEQ ID NO: 126 - DNA, 20 bp, synthetic construct
  source 1..20: mol_type = other DNA
actaagttctctcctcttga

SEQ ID NO: 127 - DNA, 20 bp, synthetic construct
  source 1..20: mol_type = other DNA
aacattccaccggaacagct

SEQ ID NO: 128 - DNA, 20 bp, synthetic construct
  source 1..20: mol_type = other DNA
aggtggaatgacatggtcag

SEQ ID NO: 129 - DNA, 20 bp, synthetic construct
  source 1..20: mol_type = other DNA
cagttgctcctgttcattcc

SEQ ID NO: 130 - DNA, 20 bp, synthetic construct
  source 1..20: mol_type = other DNA
tttagccaaggctatctcag

SEQ ID NO: 131 - DNA, 20 bp, synthetic construct
  source 1..20: mol_type = other DNA
cccttaaagagtgcagggac

SEQ ID NO: 132 - DNA, 20 bp, synthetic construct
  source 1..20: mol_type = other DNA
cctctcttcgtcctagattg

SEQ ID NO: 133 - DNA, 20 bp, synthetic construct
  source 1..20: mol_type = other DNA
gaattaccaagtgagtcctt

SEQ ID NO: 134 - DNA, 20 bp, synthetic construct
  source 1..20: mol_type = other DNA
catctgtagattcaatgcct

SEQ ID NO: 135 - DNA, 20 bp, synthetic construct
  source 1..20: mol_type = other DNA
cgttggccatctgcgacgtg

SEQ ID NO: 136 - DNA, 20 bp, synthetic construct
  source 1..20: mol_type = other DNA
ggcactctgtcacgtgtaca

SEQ ID NO: 137 - DNA, 20 bp, synthetic construct
  source 1..20: mol_type = other DNA
cttagaaggtccgggaaata

SEQ ID NO: 138 - DNA, 20 bp, synthetic construct
  source 1..20: mol_type = other DNA
atgctactaaatgtcaggga

SEQ ID NO: 139 - DNA, 20 bp, synthetic construct
  source 1..20: mol_type = other DNA
ctgcttgtagtgagacccag

SEQ ID NO: 140 - DNA, 20 bp, synthetic construct
  source 1..20: mol_type = other DNA
atacaagtccaggagatctt

SEQ ID NO: 141 - DNA, 20 bp, synthetic construct
  source 1..20: mol_type = other DNA
ggttctagagtgccagggat

SEQ ID NO: 142 - DNA, 20 bp, synthetic construct
  source 1..20: mol_type = other DNA
agaccacaatcctccttaat

SEQ ID NO: 143 - DNA, 20 bp, synthetic construct
  source 1..20: mol_type = other DNA
ctctggtggcttgcaacatc

SEQ ID NO: 144 - DNA, 20 bp, synthetic construct
  source 1..20: mol_type = other DNA
aaatagccagtgatgcccaa

SEQ ID NO: 145 - DNA, 20 bp, synthetic construct
  source 1..20: mol_type = other DNA
gcaaattatggacttccaca

SEQ ID NO: 146 - DNA, 20 bp, synthetic construct
  source 1..20: mol_type = other DNA
cttttatggtgggatcctgg

SEQ ID NO: 147 - DNA, 20 bp, synthetic construct
  source 1..20: mol_type = other DNA
atattcctcgtgggtccagg

SEQ ID NO: 148 - DNA, 20 bp, synthetic construct
  source 1..20: mol_type = other DNA
cacttgacgagacccaacat

SEQ ID NO: 149 - DNA, 20 bp, synthetic construct
  source 1..20: mol_type = other DNA
gacaattgtggccaccgaca

SEQ ID NO: 150 - DNA, 20 bp, synthetic construct
  source 1..20: mol_type = other DNA
atggaatactttgggatggg

SEQ ID NO: 151 - DNA, 20 bp, synthetic construct
  source 1..20: mol_type = other DNA
agtaagccaaaggacgtgaa

SEQ ID NO: 152 - DNA, 20 bp, synthetic construct
  source 1..20: mol_type = other DNA
ctcgaagcttcccgattgga

SEQ ID NO: 153 - DNA, 20 bp, synthetic construct
  source 1..20: mol_type = other DNA
tcaccgcaaggaaggcattc

SEQ ID NO: 154 - DNA, 20 bp, synthetic construct
  source 1..20: mol_type = other DNA
agcgttatactatgactgga

SEQ ID NO: 155 - DNA, 20 bp, synthetic construct
  source 1..20: mol_type = other DNA
gaagctctgagaattactct

SEQ ID NO: 156 - DNA, 20 bp, synthetic construct
  source 1..20: mol_type = other DNA
aggctatcacctgaataacc

SEQ ID NO: 157 - DNA, 20 bp, synthetic construct
  source 1..20: mol_type = other DNA
agtccatcacttcacttcag

SEQ ID NO: 158 - DNA, 20 bp, synthetic construct
  source 1..20: mol_type = other DNA
ttgaactccaccttcttctg

SEQ ID NO: 159 - DNA, 20 bp, synthetic construct
  source 1..20: mol_type = other DNA
atcaatcatctagcctctct

SEQ ID NO: 160 - DNA, 20 bp, synthetic construct
  source 1..20: mol_type = other DNA
agtgtttcgggaaggcaaaa

SEQ ID NO: 161 - DNA, 20 bp, synthetic construct
  source 1..20: mol_type = other DNA
ccatgtagatgccatcacga

SEQ ID NO: 162 - DNA, 20 bp, synthetic construct
  source 1..20: mol_type = other DNA
tgttgccatacttggtggca

SEQ ID NO: 163 - DNA, 20 bp, synthetic construct
  source 1..20: mol_type = other DNA
aacccacattgaaggtactg

SEQ ID NO: 164 - DNA, 20 bp, synthetic construct
  source 1..20: mol_type = other DNA
gtatgactcgttgccctcct

SEQ ID NO: 165 - DNA, 20 bp, synthetic construct
  source 1..20: mol_type = other DNA
gccaacaatttggacccaag

SEQ ID NO: 166 - DNA, 20 bp, synthetic construct
  source 1..20: mol_type = other DNA
ggttcttgtactcgggccat

SEQ ID NO: 167 - DNA, 20 bp, synthetic construct
  source 1..20: mol_type = other DNA
atcagggaatgaaacagaca

SEQ ID NO: 168 - DNA, 20 bp, synthetic construct
  source 1..20: mol_type = other DNA
tactagctcactcaggcttt

SEQ ID NO: 169 - DNA, 20 bp, synthetic construct
  source 1..20: mol_type = other DNA
ccgagcagaaatagtagccc

SEQ ID NO: 170 - DNA, 20 bp, synthetic construct
  source 1..20: mol_type = other DNA
gcggttgtcgccttccagcc

SEQ ID NO: 171 - DNA, 20 bp, synthetic construct
  source 1..20: mol_type = other DNA
tgcaagttcatagacagtcc

SEQ ID NO: 172 - DNA, 20 bp, synthetic construct
  source 1..20: mol_type = other DNA
attatctagcattgcatgcc

SEQ ID NO: 173 - DNA, 20 bp, synthetic construct
  source 1..20: mol_type = other DNA
ggtgtatatttcttcctcgt

SEQ ID NO: 174 - DNA, 20 bp, synthetic construct
  source 1..20: mol_type = other DNA
tcattccgggctttaaacaa

SEQ ID NO: 175 - DNA, 20 bp, synthetic construct
  source 1..20: mol_type = other DNA
ctggctctgaatgaacttgg

SEQ ID NO: 176 - DNA, 20 bp, synthetic construct
  source 1..20: mol_type = other DNA
ctcacgcttttggacactct

SEQ ID NO: 177 - DNA, 20 bp, synthetic construct
  source 1..20: mol_type = other DNA
caagtcaactcagataccac

SEQ ID NO: 178 - DNA, 20 bp, synthetic construct
  source 1..20: mol_type = other DNA
tttgaacccacacagaatca

SEQ ID NO: 179 - DNA, 20 bp, synthetic construct
  source 1..20: mol_type = other DNA
atatccgattagggtttgac

SEQ ID NO: 180 - DNA, 20 bp, synthetic construct
  source 1..20: mol_type = other DNA
gagtgcattcccattgaatg

SEQ ID NO: 181 - DNA, 20 bp, synthetic construct
  source 1..20: mol_type = other DNA
ccctgactttatgcctacaa

SEQ ID NO: 182 - DNA, 20 bp, synthetic construct
  source 1..20: mol_type = other DNA
ggttggaaaagtctttccaa

SEQ ID NO: 183 - DNA, 20 bp, synthetic construct
  source 1..20: mol_type = other DNA
gtctttgagggctcattcaa

SEQ ID NO: 184 - DNA, 20 bp, synthetic construct
  source 1..20: mol_type = other DNA
gaaaacttcttggacgcttt

SEQ ID NO: 185 - DNA, 20 bp, synthetic construct
  source 1..20: mol_type = other DNA
gcagagatgatggacgtcag

SEQ ID NO: 186 - DNA, 20 bp, synthetic construct
  source 1..20: mol_type = other DNA
atttgccaatttccaggaag

SEQ ID NO: 187 - DNA, 20 bp, synthetic construct
  source 1..20: mol_type = other DNA
agggaggcgtagtagaccgt

SEQ ID NO: 188 - DNA, 20 bp, synthetic construct
  source 1..20: mol_type = other DNA
gggtgcagtttatttccact

SEQ ID NO: 189 - DNA, 20 bp, synthetic construct
  source 1..20: mol_type = other DNA
gcacctgtagatccctgaga

SEQ ID NO: 190 - DNA, 20 bp, synthetic construct
  source 1..20: mol_type = other DNA
tcaaatgggatgtgtgctga

SEQ ID NO: 191 - DNA, 20 bp, synthetic construct
  source 1..20: mol_type = other DNA
aagccagtgatcgtctcagt

SEQ ID NO: 192 - DNA, 20 bp, synthetic construct
  source 1..20: mol_type = other DNA
acatcggtcacttgcatctg

SEQ ID NO: 193 - DNA, 20 bp, synthetic construct
  source 1..20: mol_type = other DNA
gtggtagatctcattgagtg

SEQ ID NO: 194 - DNA, 20 bp, synthetic construct
  source 1..20: mol_type = other DNA
gacagttcgcacaggacgtc

SEQ ID NO: 195 - DNA, 20 bp, synthetic construct
  source 1..20: mol_type = other DNA
gcacaaccaccttaggccaa

SEQ ID NO: 196 - DNA, 20 bp, synthetic construct
  source 1..20: mol_type = other DNA
caccctgttttatgggcagg

SEQ ID NO: 197 - DNA, 20 bp, synthetic construct
  source 1..20: mol_type = other DNA
acactttattctcgtgagag

SEQ ID NO: 198 - DNA, 20 bp, synthetic construct
  source 1..20: mol_type = other DNA
agtagttgtccaaactgaag

SEQ ID NO: 199 - DNA, 20 bp, synthetic construct
  source 1..20: mol_type = other DNA
catcaggcatactgtaaagt

SEQ ID NO: 200 - DNA, 20 bp, synthetic construct
  source 1..20: mol_type = other DNA
ttttcaaggccaaaggaagt

SEQ ID NO: 201 - DNA, 20 bp, synthetic construct
  source 1..20: mol_type = other DNA
accaagatgcactattgtga

SEQ ID NO: 202 - DNA, 20 bp, synthetic construct
  source 1..20: mol_type = other DNA
cactttcgatcttcctgcac

SEQ ID NO: 203 - DNA, 20 bp, synthetic construct
  source 1..20: mol_type = other DNA
ctgaacaaaggccatgtagg

SEQ ID NO: 204 - DNA, 20 bp, synthetic construct
  source 1..20: mol_type = other DNA
acagtgacttctcgcagggt

SEQ ID NO: 205 - DNA, 20 bp, synthetic construct
  source 1..20: mol_type = other DNA
tgtagtaactttggctgttg

SEQ ID NO: 206 - DNA, 20 bp, synthetic construct
  source 1..20: mol_type = other DNA
gtttgagctctaacatccat

SEQ ID NO: 207 - DNA, 20 bp, synthetic construct
  source 1..20: mol_type = other DNA
accgacctccgctctgtatt

SEQ ID NO: 208 - DNA, 20 bp, synthetic construct
  source 1..20: mol_type = other DNA
ttcttcaagtcacaaaggga

SEQ ID NO: 209 - DNA, 20 bp, synthetic construct
  source 1..20: mol_type = other DNA
ggagcaatcgaagaggcata

SEQ ID NO: 210 - DNA, 20 bp, synthetic construct
  source 1..20: mol_type = other DNA
tggaaaatctcatcaccatc

SEQ ID NO: 211 - DNA, 20 bp, synthetic construct
  source 1..20: mol_type = other DNA
cgctccacctttgaaaaaag

SEQ ID NO: 212 - DNA, 20 bp, synthetic construct
  source 1..20: mol_type = other DNA
atgaattggcggcggcggtg

SEQ ID NO: 213 - DNA, 20 bp, synthetic construct
  source 1..20: mol_type = other DNA
tcccgttcttgcatttgcat

SEQ ID NO: 214 - DNA, 20 bp, synthetic construct
  source 1..20: mol_type = other DNA
ttcttgtagtctgctcctct

SEQ ID NO: 215 - DNA, 20 bp, synthetic construct
  source 1..20: mol_type = other DNA
aggttggctgcctagttggc

SEQ ID NO: 216 - DNA, 20 bp, synthetic construct
  source 1..20: mol_type = other DNA
tcttttggatgctctggtca

SEQ ID NO: 217 - DNA, 20 bp, synthetic construct
  source 1..20: mol_type = other DNA
agttatcaagcatgccagga

SEQ ID NO: 218 - DNA, 20 bp, synthetic construct
  source 1..20: mol_type = other DNA
aagtgatggagtcgggaagg

SEQ ID NO: 219 - DNA, 20 bp, synthetic construct
  source 1..20: mol_type = other DNA
ggtgctggactttgcacacc

SEQ ID NO: 220 - DNA, 20 bp, synthetic construct
  source 1..20: mol_type = other DNA
cggcgccgcacatacagctg

SEQ ID NO: 221 - DNA, 20 bp, synthetic construct
  source 1..20: mol_type = other DNA
cactgcggtaaggtcatagg

SEQ ID NO: 222 - DNA, 20 bp, synthetic construct
  source 1..20: mol_type = other DNA
gtaaccctaagggcaggagc

SEQ ID NO: 223 - DNA, 20 bp, synthetic construct
  source 1..20: mol_type = other DNA
aggacagcttggttctagcg

SEQ ID NO: 224 - DNA, 20 bp, synthetic construct
  source 1..20: mol_type = other DNA
acttaaagttcgttctgccc

SEQ ID NO: 225 - DNA, 20 bp, synthetic construct
  source 1..20: mol_type = other DNA
gtagtaatctgaggaccttt

SEQ ID NO: 226 - DNA, 20 bp, synthetic construct
  source 1..20: mol_type = other DNA
attcgtagctggatgccgcc

SEQ ID NO: 227 - DNA, 20 bp, synthetic construct
  source 1..20: mol_type = other DNA
tcagttatatcctggccgcc

SEQ ID NO: 228 - DNA, 20 bp, synthetic construct
  source 1..20: mol_type = other DNA
tctctggcgggtcatcgtca

SEQ ID NO: 229 - DNA, 20 bp, synthetic construct
  source 1..20: mol_type = other DNA
tggttgcagccatttctgtc

SEQ ID NO: 230 - DNA, 20 bp, synthetic construct
  source 1..20: mol_type = other DNA
tctcgagttgtagaagcatg

SEQ ID NO: 231 - DNA, 20 bp, synthetic construct
  source 1..20: mol_type = other DNA
ggcatcctctcttcaccggc

SEQ ID NO: 232 - DNA, 20 bp, synthetic construct
  source 1..20: mol_type = other DNA
ttggaaggttcaggttgttt

SEQ ID NO: 233 - DNA, 20 bp, synthetic construct
  source 1..20: mol_type = other DNA
ctagactaggttgtccctcc

SEQ ID NO: 234 - DNA, 20 bp, synthetic construct
  source 1..20: mol_type = other DNA
gagctttctctgcaggagtg

SEQ ID NO: 235 - DNA, 20 bp, synthetic construct
  source 1..20: mol_type = other DNA
actttacctccacgagggcc

SEQ ID NO: 236 - DNA, 20 bp, synthetic construct
  source 1..20: mol_type = other DNA
ccttcccatccacgtttgtt

SEQ ID NO: 237 - DNA, 20 bp, synthetic construct
  source 1..20: mol_type = other DNA
cgggttcttaaggccgccgg

SEQ ID NO: 238 - DNA, 20 bp, synthetic construct
  source 1..20: mol_type = other DNA
agaggttgcctttgagggta

SEQ ID NO: 239 - DNA, 20 bp, synthetic construct
  source 1..20: mol_type = other DNA
actctggtcatgttgatgaa

SEQ ID NO: 240 - DNA, 20 bp, synthetic construct
  source 1..20: mol_type = other DNA
cgccaggaagtcagatgctg

SEQ ID NO: 241 - DNA, 20 bp, synthetic construct
  source 1..20: mol_type = other DNA
aaagcgcctgtactcccgga

SEQ ID NO: 242 - DNA, 20 bp, synthetic construct
  source 1..20: mol_type = other DNA
tccggaaatcagctgcttcc

SEQ ID NO: 243 - DNA, 20 bp, synthetic construct
  source 1..20: mol_type = other DNA
atctggttctcaatggtgag

SEQ ID NO: 244 - DNA, 20 bp, synthetic construct
  source 1..20: mol_type = other DNA
gtcatggccgcatctgactt

SEQ ID NO: 245 - DNA, 20 bp, synthetic construct
  source 1..20: mol_type = other DNA
agtacacagaactagacaca

SEQ ID NO: 246 - DNA, 20 bp, synthetic construct
  source 1..20: mol_type = other DNA
aggagaataatcccagcaca

SEQ ID NO: 247 - DNA, 20 bp, synthetic construct
  source 1..20: mol_type = other DNA
agagatcagtaatgggaagc

SEQ ID NO: 248 - DNA, 20 bp, synthetic construct
  source 1..20: mol_type = other DNA
gtaagagagtccaatccagt

SEQ ID NO: 249 - DNA, 20 bp, synthetic construct
  source 1..20: mol_type = other DNA
atccaatccagcctgctgag

SEQ ID NO: 250 - DNA, 20 bp, synthetic construct
  source 1..20: mol_type = other DNA
ttttagatctccagtgtcct

SEQ ID NO: 251 - DNA, 20 bp, synthetic construct
  source 1..20: mol_type = other DNA
aactataggacatgatgcct

SEQ ID NO: 252 - DNA, 20 bp, synthetic construct
  source 1..20: mol_type = other DNA
tctacctaacagtcttgaac

SEQ ID NO: 253 - DNA, 20 bp, synthetic construct
  source 1..20: mol_type = other DNA
agccatctctgtaggtgagg

SEQ ID NO: 254 - DNA, 20 bp, synthetic construct
  source 1..20: mol_type = other DNA
gcgtacactgtcaagggagt

SEQ ID NO: 255 - DNA, 20 bp, synthetic construct
  source 1..20: mol_type = other DNA
gaggtgttgtgtcttcaaga

SEQ ID NO: 256 - DNA, 20 bp, synthetic construct
  source 1..20: mol_type = other DNA
agatttttatctccctcagg

SEQ ID NO: 257 - DNA, 20 bp, synthetic construct
  source 1..20: mol_type = other DNA
gggatccagaatgctggcta

SEQ ID NO: 258 - DNA, 20 bp, synthetic construct
  source 1..20: mol_type = other DNA
accggactgttatttatcca

SEQ ID NO: 259 - DNA, 20 bp, synthetic construct
  source 1..20: mol_type = other DNA
agctgctacaatggctacat

SEQ ID NO: 260 - DNA, 20 bp, synthetic construct
  source 1..20: mol_type = other DNA
aacagtattgggtagatggg

SEQ ID NO: 261 - DNA, 20 bp, synthetic construct
  source 1..20: mol_type = other DNA
atgagccgccttggattttc

SEQ ID NO: 262 - DNA, 20 bp, synthetic construct
  source 1..20: mol_type = other DNA
tactcagcattccagtccag

SEQ ID NO: 263 - DNA, 20 bp, synthetic construct
  source 1..20: mol_type = other DNA
cagtagaaggtcaccttctc

SEQ ID NO: 264 - DNA, 20 bp, synthetic construct
  source 1..20: mol_type = other DNA
gtgtgttcagccttctcctg

SEQ ID NO: 265 - DNA, 20 bp, synthetic construct
  source 1..20: mol_type = other DNA
tcaaaactcatcttgccgct

SEQ ID NO: 266 - DNA, 20 bp, synthetic construct
  source 1..20: mol_type = other DNA
attccagaacacacagctga

SEQ ID NO: 267 - DNA, 20 bp, synthetic construct
  source 1..20: mol_type = other DNA
tgtacagttccttagggact

SEQ ID NO: 268 - DNA, 20 bp, synthetic construct
  source 1..20: mol_type = other DNA
tttggaactggccggctggc

SEQ ID NO: 269 - DNA, 20 bp, synthetic construct
  source 1..20: mol_type = other DNA
aaccaaagaacatgccggtg

SEQ ID NO: 270 - DNA, 20 bp, synthetic construct
  source 1..20: mol_type = other DNA
gtacttcaccatcactgact

SEQ ID NO: 271 - DNA, 20 bp, synthetic construct
  source 1..20: mol_type = other DNA
cacatctgtcatagataagc

SEQ ID NO: 272 - DNA, 20 bp, synthetic construct
  source 1..20: mol_type = other DNA
ttgtagagctgagtcttctc

SEQ ID NO: 273 - DNA, 20 bp, synthetic construct
  source 1..20: mol_type = other DNA
gtcattggtgtagatttcac

SEQ ID NO: 274 - DNA, 20 bp, synthetic construct
  source 1..20: mol_type = other DNA
cgcatccagttgcttttctc

SEQ ID NO: 275 - DNA, 20 bp, synthetic construct
  source 1..20: mol_type = other DNA
gacagggtgaatcgggatta

SEQ ID NO: 276 - DNA, 20 bp, synthetic construct
  source 1..20: mol_type = other DNA
ggaggtgtgatggccgccaa

SEQ ID NO: 277 - DNA, 20 bp, synthetic construct
  source 1..20: mol_type = other DNA
atcgcacttatactggtcaa

SEQ ID NO: 278 - DNA, 20 bp, synthetic construct
  source 1..20: mol_type = other DNA
gggtggaacattcctaccac

SEQ ID NO: 279 - DNA, 20 bp, synthetic construct
  source 1..20: mol_type = other DNA
agtcatcgtcttgcactctg

SEQ ID NO: 280 - DNA, 20 bp, synthetic construct
  source 1..20: mol_type = other DNA
ctgagcagatgaaggtacat

SEQ ID NO: 281 - DNA, 20 bp, synthetic construct
  source 1..20: mol_type = other DNA
caatttccgccttgttttgt

SEQ ID NO: 282 - DNA, 20 bp, synthetic construct
  source 1..20: mol_type = other DNA
atgggcacgaagcctgtggt

SEQ ID NO: 283 - DNA, 20 bp, synthetic construct
  source 1..20: mol_type = other DNA
ttctgatcactctttgccac

SEQ ID NO: 284 - DNA, 20 bp, synthetic construct
  source 1..20: mol_type = other DNA
tcatagacatctggattggg

SEQ ID NO: 285 - DNA, 20 bp, synthetic construct
  source 1..20: mol_type = other DNA
ggagatcaccacaactggca

SEQ ID NO: 286 - DNA, 20 bp, synthetic construct
  source 1..20: mol_type = other DNA
accctgaataattcacacca

SEQ ID NO: 287 - DNA, 20 bp, synthetic construct
  source 1..20: mol_type = other DNA
acttcagagggttttcagga

SEQ ID NO: 288 - DNA, 20 bp, synthetic construct
  source 1..20: mol_type = other DNA
cagagtggaatctcacttcc

SEQ ID NO: 289 - DNA, 20 bp, synthetic construct
  source 1..20: mol_type = other DNA
cagactttactgcagcagct

SEQ ID NO: 290 - DNA, 20 bp, synthetic construct
  source 1..20: mol_type = other DNA
agattcccgcacctgcactt

SEQ ID NO: 291 - DNA, 20 bp, synthetic construct
  source 1..20: mol_type = other DNA
ccgctctggtaccgccagtg

SEQ ID NO: 292 - DNA, 20 bp, synthetic construct
  source 1..20: mol_type = other DNA
tgtagttagggcagaggatg

SEQ ID NO: 293 - DNA, 20 bp, synthetic construct
  source 1..20: mol_type = other DNA
cagggtagagctgccacatg

SEQ ID NO: 294 - DNA, 20 bp, synthetic construct
  source 1..20: mol_type = other DNA
actagtgctgtgagggacag

SEQ ID NO: 295 - DNA, 20 bp, synthetic construct
  source 1..20: mol_type = other DNA
gagcctcagcagacgcagct

SEQ ID NO: 296 - DNA, 20 bp, synthetic construct
  source 1..20: mol_type = other DNA
ggaatagtgcagacaggcag

SEQ ID NO: 297 - DNA, 20 bp, synthetic construct
  source 1..20: mol_type = other DNA
caatggaatctggaacctgg

SEQ ID NO: 298 - DNA, 20 bp, synthetic construct
  source 1..20: mol_type = other DNA
accagtaaatccaacctccc

SEQ ID NO: 299 - DNA, 20 bp, synthetic construct
  source 1..20: mol_type = other DNA
acggtacatccacgtagttt

SEQ ID NO: 300 - DNA, 20 bp, synthetic construct
  source 1..20: mol_type = other DNA
tagagatctcacagaaccaa

SEQ ID NO: 301 - DNA, 20 bp, synthetic construct
  source 1..20: mol_type = other DNA
gagactggacaagccattga

SEQ ID NO: 302 - DNA, 20 bp, synthetic construct
  source 1..20: mol_type = other DNA
ccatcttcaattgtctggat

SEQ ID NO: 303 - DNA, 20 bp, synthetic construct
  source 1..20: mol_type = other DNA
gttcctttcactgaattggt

SEQ ID NO: 304 - DNA, 20 bp, synthetic construct
  source 1..20: mol_type = other DNA
cattaagctcccaacagtaa

SEQ ID NO: 305 - DNA, 20 bp, synthetic construct
  source 1..20: mol_type = other DNA
cgttgtagaagcccggcccg

SEQ ID NO: 306 - DNA, 20 bp, synthetic construct
  source 1..20: mol_type = other DNA
gggactgcaaatctgattcc

SEQ ID NO: 307 - DNA, 20 bp, synthetic construct
  source 1..20: mol_type = other DNA
caaagctgattccaagagaa

SEQ ID NO: 308 - DNA, 20 bp, synthetic construct
  source 1..20: mol_type = other DNA
acggcacgcttatttctgct

SEQ ID NO: 309 - DNA, 20 bp, synthetic construct
  source 1..20: mol_type = other DNA
agtaaattatggatgccacg

SEQ ID NO: 310 - DNA, 20 bp, synthetic construct
  source 1..20: mol_type = other DNA
ctcggtgaagggagtccggc

SEQ ID NO: 311 - DNA, 20 bp, synthetic construct
  source 1..20: mol_type = other DNA
gtgagaggaagagaacctgc

SEQ ID NO: 312 - DNA, 20 bp, synthetic construct
  source 1..20: mol_type = other DNA
cctaaggtccacttgtgtca

SEQ ID NO: 313 - DNA, 20 bp, synthetic construct
  source 1..20: mol_type = other DNA
gtataggcgccatctataga

SEQ ID NO: 314 - DNA, 20 bp, synthetic construct
  source 1..20: mol_type = other DNA
ttcgttcccaaaactaacag

SEQ ID NO: 315 - DNA, 20 bp, synthetic construct
  source 1..20: mol_type = other DNA
ttcagtgcgacgccgcgagc

SEQ ID NO: 316 - DNA, 20 bp, synthetic construct
  source 1..20: mol_type = other DNA
tcttcgccgggacatctgcc

SEQ ID NO: 317 - DNA, 20 bp, synthetic construct
  source 1..20: mol_type = other DNA
gtcagctatgaaattctgtg

SEQ ID NO: 318 - DNA, 20 bp, synthetic construct
  source 1..20: mol_type = other DNA
gacaggacagtcacgcagag

SEQ ID NO: 319 - DNA, 20 bp, synthetic construct
  source 1..20: mol_type = other DNA
ccatgtagctcaggtagaca

SEQ ID NO: 320 - DNA, 20 bp, synthetic construct
  source 1..20: mol_type = other DNA
gatgcattctgagccgagaa

SEQ ID NO: 321 - DNA, 20 bp, synthetic construct
  source 1..20: mol_type = other DNA
tttcagaatggtgaggttag

SEQ ID NO: 322 - DNA, 20 bp, synthetic construct
  source 1..20: mol_type = other DNA
cactggagctggaaatagct

SEQ ID NO: 323 - DNA, 20 bp, synthetic construct
  source 1..20: mol_type = other DNA
acagtctctgaagacacatt

SEQ ID NO: 324 - DNA, 20 bp, synthetic construct
  source 1..20: mol_type = other DNA
aaacagagacagctaaagct

SEQ ID NO: 325 - DNA, 20 bp, synthetic construct
  source 1..20: mol_type = other DNA
ctcactggtttgccaatata

SEQ ID NO: 326 - DNA, 20 bp, synthetic construct
  source 1..20: mol_type = other DNA
ctgacttccttctcctgagt

SEQ ID NO: 327 - DNA, 20 bp, synthetic construct
  source 1..20: mol_type = other DNA
tcccacttgagggcgtccag

SEQ ID NO: 328 - DNA, 20 bp, synthetic construct
  source 1..20: mol_type = other DNA
attatgcacctccacgccgt

SEQ ID NO: 329 - DNA, 20 bp, synthetic construct
  source 1..20: mol_type = other DNA
accctctttgtcgtcttgcc

SEQ ID NO: 330 - DNA, 20 bp, synthetic construct
  source 1..20: mol_type = other DNA
caagaagcctggctctcata

SEQ ID NO: 331 - DNA, 20 bp, synthetic construct
  source 1..20: mol_type = other DNA
cttgtggataaaagccttct

SEQ ID NO: 332 - DNA, 20 bp, synthetic construct
  source 1..20: mol_type = other DNA
gggcctctttatagcgacag

SEQ ID NO: 333 - DNA, 20 bp, synthetic construct
  source 1..20: mol_type = other DNA
tggcatttaaaggaagccag

SEQ ID NO: 334 - DNA, 20 bp, synthetic construct
  source 1..20: mol_type = other DNA
atgaataggaagcgcagggc

SEQ ID NO: 335 - DNA, 20 bp, synthetic construct
  source 1..20: mol_type = other DNA
acgaaggcatcgtagggcag

SEQ ID NO: 336 - DNA, 20 bp, synthetic construct
  source 1..20: mol_type = other DNA
gtcatagagcttaagcgtct

SEQ ID NO: 337 - DNA, 20 bp, synthetic construct
  source 1..20: mol_type = other DNA
ggtatcttctgaacttctcc

SEQ ID NO: 338 - DNA, 20 bp, synthetic construct
  source 1..20: mol_type = other DNA
caaatcagaatggcagtttg

SEQ ID NO: 339 - DNA, 20 bp, synthetic construct
  source 1..20: mol_type = other DNA
ccttggaagatgggaaaggt

SEQ ID NO: 340 - DNA, 20 bp, synthetic construct
  source 1..20: mol_type = other DNA
tacattatggaggctttctc

SEQ ID NO: 341 - DNA, 20 bp, synthetic construct
  source 1..20: mol_type = other DNA
ttataagggcttgactccag

SEQ ID NO: 342 - DNA, 20 bp, synthetic construct
  source 1..20: mol_type = other DNA
tgtaatagacctccagaaca

SEQ ID NO: 343 - DNA, 20 bp, synthetic construct
  source 1..20: mol_type = other DNA
gtgaagaagcttgagtttgc

SEQ ID NO: 344 - DNA, 20 bp, synthetic construct
  source 1..20: mol_type = other DNA
tggttggtgctgatgcagga

SEQ ID NO: 345 - DNA, 20 bp, synthetic construct
  source 1..20: mol_type = other DNA
ttggattttgagcctgagaa

SEQ ID NO: 346 - DNA, 20 bp, synthetic construct
  source 1..20: mol_type = other DNA
gcgggaagacgatggctgcc

SEQ ID NO: 347 - DNA, 20 bp, synthetic construct
  source 1..20: mol_type = other DNA
tggccacgtctaccctgctt

SEQ ID NO: 348 - DNA, 20 bp, synthetic construct
  source 1..20: mol_type = other DNA
accaggatgaccaatccatt

SEQ ID NO: 349 - DNA, 20 bp, synthetic construct
  source 1..20: mol_type = other DNA
cactgacgttggcaaagatg

SEQ ID NO: 350 - DNA, 20 bp, synthetic construct
  source 1..20: mol_type = other DNA
ctcctaaactgaggtcagac

SEQ ID NO: 351 - DNA, 20 bp, synthetic construct
  source 1..20: mol_type = other DNA
ccttcagcctcgccagggtg

SEQ ID NO: 352 - DNA, 20 bp, synthetic construct
  source 1..20: mol_type = other DNA
atgcctgcataggcccagaa

SEQ ID NO: 353 - DNA, 20 bp, synthetic construct
  source 1..20: mol_type = other DNA
gcctaaccagccaggcgtgg

SEQ ID NO: 354 - DNA, 20 bp, synthetic construct
  source 1..20: mol_type = other DNA
ttgcggacgccgtcttcctc

SEQ ID NO: 355 - DNA, 20 bp, synthetic construct
  source 1..20: mol_type = other DNA
gttatgttcaggctgacgac

SEQ ID NO: 356 - DNA, 20 bp, synthetic construct
  source 1..20: mol_type = other DNA
tatggtttgcctcttgtact

SEQ ID NO: 357 - DNA, 20 bp, synthetic construct
  source 1..20: mol_type = other DNA
agcgcgattgaagtgctccg

SEQ ID NO: 358 - DNA, 20 bp, synthetic construct
  source 1..20: mol_type = other DNA
acgcgttgtaagaataccct

SEQ ID NO: 359 - DNA, 20 bp, synthetic construct
  source 1..20: mol_type = other DNA
cgcagtttaaggtacgtcgc

SEQ ID NO: 360 - DNA, 20 bp, synthetic construct
  source 1..20: mol_type = other DNA
tgttgcagacaattgtcagg

SEQ ID NO: 361 - DNA, 20 bp, synthetic construct
  source 1..20: mol_type = other DNA
tcgcttaaacgttggttcag

SEQ ID NO: 362 - DNA, 20 bp, synthetic construct
  source 1..20: mol_type = other DNA
agcacccgcggaccggaaaa

SEQ ID NO: 363 - DNA, 20 bp, synthetic construct
  source 1..20: mol_type = other DNA
cctcttcattgtcgaaagat

SEQ ID NO: 364 - DNA, 20 bp, synthetic construct
  source 1..20: mol_type = other DNA
cgtagcgtgatggtcttata

SEQ ID NO: 365 - DNA, 20 bp, synthetic construct
  source 1..20: mol_type = other DNA
cactcggtatcgtgcagaca

SEQ ID NO: 366 - DNA, 20 bp, synthetic construct
  source 1..20: mol_type = other DNA
gtccatagcagatataggaa

SEQ ID NO: 367 - DNA, 20 bp, synthetic construct
  source 1..20: mol_type = other DNA
tgacgcagtaattggagatc

SEQ ID NO: 368 - DNA, 20 bp, synthetic construct
  source 1..20: mol_type = other DNA
aaagccttgaagatcagcct

SEQ ID NO: 369 - DNA, 20 bp, synthetic construct
  source 1..20: mol_type = other DNA
tctgtagatgatgacgccga

SEQ ID NO: 370 - DNA, 20 bp, synthetic construct
  source 1..20: mol_type = other DNA
aacaggactgcactctccag

SEQ ID NO: 371 - DNA, 20 bp, synthetic construct
  source 1..20: mol_type = other DNA
cgcgtatctgttccaaaaga

SEQ ID NO: 372 - DNA, 20 bp, synthetic construct
  source 1..20: mol_type = other DNA
cggcgaagtgccagattgca

SEQ ID NO: 373 - DNA, 20 bp, synthetic construct
  source 1..20: mol_type = other DNA
ttctgcccttcggtcagcac

SEQ ID NO: 374 - DNA, 20 bp, synthetic construct
  source 1..20: mol_type = other DNA
cggtgcaaggacccacaggg

SEQ ID NO: 375 - DNA, 20 bp, synthetic construct
  source 1..20: mol_type = other DNA
atgtccgggtctcccagggc

SEQ ID NO: 376 - DNA, 20 bp, synthetic construct
  source 1..20: mol_type = other DNA
aactagaactaccagggccc

SEQ ID NO: 377 - DNA, 20 bp, synthetic construct
  source 1..20: mol_type = other DNA
caaatcaccaaggtagatct

SEQ ID NO: 378 - DNA, 20 bp, synthetic construct
  source 1..20: mol_type = other DNA
acaattggtctagtcttcac

SEQ ID NO: 379 - DNA, 20 bp, synthetic construct
  source 1..20: mol_type = other DNA
ccacatcgtgcttcttgccc

SEQ ID NO: 380 - DNA, 20 bp, synthetic construct
  source 1..20: mol_type = other DNA
cagagtggccattgttggtg

SEQ ID NO: 381 - DNA, 20 bp, synthetic construct
  source 1..20: mol_type = other DNA
ttttcagcacgtcatcaatc

SEQ ID NO: 382 - DNA, 20 bp, synthetic construct
  source 1..20: mol_type = other DNA
atccaagtgcacagaaccat

SEQ ID NO: 383 - DNA, 20 bp, synthetic construct
  source 1..20: mol_type = other DNA
tctgcgataccctcagctgc

SEQ ID NO: 384 - DNA, 20 bp, synthetic construct
  source 1..20: mol_type = other DNA
cagactggcagtaacacgtg

SEQ ID NO: 385 - DNA, 20 bp, synthetic construct
  source 1..20: mol_type = other DNA
agcacatggtttttagctca

SEQ ID NO: 386 - DNA, 20 bp, synthetic construct
  source 1..20: mol_type = other DNA
atactggttcagagacctgt

SEQ ID NO: 387 - DNA, 20 bp, synthetic construct
  source 1..20: mol_type = other DNA
ttctcaccaggagaaaaaca

SEQ ID NO: 388 - DNA, 20 bp, synthetic construct
  source 1..20: mol_type = other DNA
ctgctcaggaacatgatggt

SEQ ID NO: 389 - DNA, 20 bp, synthetic construct
  source 1..20: mol_type = other DNA
gctcttaagatgtagaggga

SEQ ID NO: 390 - DNA, 20 bp, synthetic construct
  source 1..20: mol_type = other DNA
ttggattccagaaacggagg

SEQ ID NO: 391 - DNA, 20 bp, synthetic construct
  source 1..20: mol_type = other DNA
ggtggtcacttggtctttat

SEQ ID NO: 392 - DNA, 20 bp, synthetic construct
  source 1..20: mol_type = other DNA
tttggcttccgcagtgtaaa

SEQ ID NO: 393 - DNA, 20 bp, synthetic construct
  source 1..20: mol_type = other DNA
aacaacccaaacagcagcaa

SEQ ID NO: 394 - DNA, 20 bp, synthetic construct
  source 1..20: mol_type = other DNA
ggtcgctttggttcttactg

SEQ ID NO: 395 - DNA, 20 bp, synthetic construct
  source 1..20: mol_type = other DNA
ggtgcaaacatggaatagaa

SEQ ID NO: 396 - DNA, 20 bp, synthetic construct
  source 1..20: mol_type = other DNA
tgcgtcatttcttgtgacat

SEQ ID NO: 397 - DNA, 20 bp, synthetic construct
  source 1..20: mol_type = other DNA
gaccacatagggagaaaatg

SEQ ID NO: 398 - DNA, 20 bp, synthetic construct
  source 1..20: mol_type = other DNA
aactcgcccaaggtactcaa

SEQ ID NO: 399 - DNA, 20 bp, synthetic construct
  source 1..20: mol_type = other DNA
cggatctagatcctcctgat

SEQ ID NO: 400 - DNA, 20 bp, synthetic construct
  source 1..20: mol_type = other DNA
gctgtgtttcttctgctgat

SEQ ID NO: 401 - DNA, 20 bp, synthetic construct
  source 1..20: mol_type = other DNA
ctgggtaggtcagaggtttt

SEQ ID NO: 402 - DNA, 20 bp, synthetic construct
  source 1..20: mol_type = other DNA
tacctcggcgatttcctggt

SEQ ID NO: 403 - DNA, 20 bp, synthetic construct
  source 1..20: mol_type = other DNA
acagctgcagttctcctatc

SEQ ID NO: 404 - DNA, 20 bp, synthetic construct
  source 1..20: mol_type = other DNA
gcataaactaccagagggct

SEQ ID NO: 405 - DNA, 20 bp, synthetic construct
  source 1..20: mol_type = other DNA
gaatgtagctctccaatcac

SEQ ID NO: 406 - DNA, 20 bp, synthetic construct
  source 1..20: mol_type = other DNA
attcttgaaagaatcagcgc

SEQ ID NO: 407 - DNA, 20 bp, synthetic construct
  source 1..20: mol_type = other DNA
gccgatccatcccaggaagg

SEQ ID NO: 408 - DNA, 20 bp, synthetic construct
  source 1..20: mol_type = other DNA
ggaaatagactggtagagag

SEQ ID NO: 409 - DNA, 20 bp, synthetic construct
  source 1..20: mol_type = other DNA
tgccacgatggtgatcttgg

SEQ ID NO: 410 - DNA, 20 bp, synthetic construct
  source 1..20: mol_type = other DNA
catgaactagatcctggaga

SEQ ID NO: 411 - DNA, 20 bp, synthetic construct
  source 1..20: mol_type = other DNA
tgtgttacagacgggaagtt

SEQ ID NO: 412 - DNA, 20 bp, synthetic construct
  source 1..20: mol_type = other DNA
cgagtcagaagtgtgggaag

SEQ ID NO: 413 - DNA, 20 bp, synthetic construct
  source 1..20: mol_type = other DNA
taagactgagattggtacca

SEQ ID NO: 414 - DNA, 20 bp, synthetic construct
  source 1..20: mol_type = other DNA
tagccacatcccttcttcaa

SEQ ID NO: 415 - DNA, 20 bp, synthetic construct
  source 1..20: mol_type = other DNA
ttggcagatggtaactcaca

SEQ ID NO: 416 - DNA, 20 bp, synthetic construct
  source 1..20: mol_type = other DNA
cgagtctttctccaaaatcg

SEQ ID NO: 417 - DNA, 20 bp, synthetic construct
  source 1..20: mol_type = other DNA
gccgtgcagtgaggcaagtt

SEQ ID NO: 418 - DNA, 20 bp, synthetic construct
  source 1..20: mol_type = other DNA
attctcctcaaacggttgag

SEQ ID NO: 419 - DNA, 20 bp, synthetic construct
  source 1..20: mol_type = other DNA
gtcgtcccatttggccactt

SEQ ID NO: 420 - DNA, 20 bp, synthetic construct
  source 1..20: mol_type = other DNA
actggtagtccatagtgaag

SEQ ID NO: 421 - DNA, 20 bp, synthetic construct
  source 1..20: mol_type = other DNA
cagcaccagggtggtggcca

SEQ ID NO: 422 - DNA, 20 bp, synthetic construct
  source 1..20: mol_type = other DNA
tgtgcgaacccgtgccaacc

SEQ ID NO: 423 - DNA, 20 bp, synthetic construct
  source 1..20: mol_type = other DNA
gcttaccaactggctaggca

SEQ ID NO: 424 - DNA, 20 bp, synthetic construct
  source 1..20: mol_type = other DNA
gccggttcggcaatagcagg

SEQ ID NO: 425 - DNA, 20 bp, synthetic construct
  source 1..20: mol_type = other DNA
gtacttcttcctgatggagt

SEQ ID NO: 426 - DNA, 20 bp, synthetic construct
  source 1..20: mol_type = other DNA
caagcagtcggagcagttct

SEQ ID NO: 427 - DNA, 20 bp, synthetic construct
  source 1..20: mol_type = other DNA
cttgcgtcgtacttgttctt

SEQ ID NO: 428 - DNA, 20 bp, synthetic construct
  source 1..20: mol_type = other DNA
gatcctagactggagtgtgc

SEQ ID NO: 429 - DNA, 20 bp, synthetic construct
  source 1..20: mol_type = other DNA
gcttgtagttttcacagaca

SEQ ID NO: 430 - DNA, 20 bp, synthetic construct
  source 1..20: mol_type = other DNA
gagaattcaggtgctttttc

SEQ ID NO: 431 - DNA, 20 bp, synthetic construct
  source 1..20: mol_type = other DNA
ccgataggctatggcctctg

SEQ ID NO: 432 - DNA, 20 bp, synthetic construct
  source 1..20: mol_type = other DNA
gtgatcaaactgacccatga

SEQ ID NO: 433 - DNA, 20 bp, synthetic construct
  source 1..20: mol_type = other DNA
cattctgcacgatttccgac

SEQ ID NO: 434 - DNA, 20 bp, synthetic construct
  source 1..20: mol_type = other DNA
ggcgttggccaggacttact

SEQ ID NO: 435 - DNA, 20 bp, synthetic construct
  source 1..20: mol_type = other DNA
ttccaatgtgcaatgacacg

SEQ ID NO: 436 - DNA, 20 bp, synthetic construct
  source 1..20: mol_type = other DNA
ctgtacatcttgctggtgaa

SEQ ID NO: 437 - DNA, 20 bp, synthetic construct
  source 1..20: mol_type = other DNA
cgagcggagtgtaaggccaa

SEQ ID NO: 438 - DNA, 20 bp, synthetic construct
  source 1..20: mol_type = other DNA
gggtagagaaccctgcggct

SEQ ID NO: 439 - DNA, 20 bp, synthetic construct
  source 1..20: mol_type = other DNA
ggcattcttttaggtaagac

SEQ ID NO: 440 - DNA, 20 bp, synthetic construct
  source 1..20: mol_type = other DNA
tcaaaagaggcagatgcaca

SEQ ID NO: 441 - DNA, 20 bp, synthetic construct
  source 1..20: mol_type = other DNA
cctcagttatctcacggctg

SEQ ID NO: 442 - DNA, 20 bp, synthetic construct
  source 1..20: mol_type = other DNA
ctctcctcgaagatcgtggg

SEQ ID NO: 443 - DNA, 20 bp, synthetic construct
  source 1..20: mol_type = other DNA
acggctcggaaggagggcct

SEQ ID NO: 444 - DNA, 20 bp, synthetic construct
  source 1..20: mol_type = other DNA
tcggcctcgcttggatggcg

SEQ ID NO: 445 - DNA, 20 bp, synthetic construct
  source 1..20: mol_type = other DNA
attcatgatgacgccaaggt

SEQ ID NO: 446 - DNA, 20 bp, synthetic construct
  source 1..20: mol_type = other DNA
tattcctctctcagtctcat

SEQ ID NO: 447 - DNA, 20 bp, synthetic construct
  source 1..20: mol_type = other DNA
gaagggctttcaggtcttcc

SEQ ID NO: 448 - DNA, 20 bp, synthetic construct
  source 1..20: mol_type = other DNA
agagatgagatctgtgctcc

SEQ ID NO: 449 - DNA, 20 bp, synthetic construct
  source 1..20: mol_type = other DNA
gtttgtagctcgtgtgttgt

SEQ ID NO: 450 - DNA, 20 bp, synthetic construct
  source 1..20: mol_type = other DNA
aatcgtggctgaaggtgctg

SEQ ID NO: 451 - DNA, 20 bp, synthetic construct
  source 1..20: mol_type = other DNA
ttttactacatctgcccatg

SEQ ID NO: 452 - DNA, 20 bp, synthetic construct
  source 1..20: mol_type = other DNA
agctgtctggagttcatcct

SEQ ID NO: 453 - DNA, 20 bp, synthetic construct
  source 1..20: mol_type = other DNA
gacagacgcattgttttcca

SEQ ID NO: 454 - DNA, 20 bp, synthetic construct
  source 1..20: mol_type = other DNA
gaaagtgtcctcttcactat

SEQ ID NO: 455 - DNA, 20 bp, synthetic construct
  source 1..20: mol_type = other DNA
cgtaacaactgttgcgggtt

SEQ ID NO: 456 - DNA, 20 bp, synthetic construct
  source 1..20: mol_type = other DNA
ccagagtcaattgtaccacc

SEQ ID NO: 457 - DNA, 20 bp, synthetic construct
  source 1..20: mol_type = other DNA
cgtcttccacgcagtgggta

SEQ ID NO: 458 - DNA, 20 bp, synthetic construct
  source 1..20: mol_type = other DNA
tactcggtgtgccggttggt

SEQ ID NO: 459 - DNA, 20 bp, synthetic construct
  source 1..20: mol_type = other DNA
aaggtcccgtgggtggtgtt

SEQ ID NO: 460 - DNA, 20 bp, synthetic construct
  source 1..20: mol_type = other DNA
tgttggcgccaggctcgtgg

SEQ ID NO: 461 - DNA, 20 bp, synthetic construct
  source 1..20: mol_type = other DNA
cgagaagtcgtacacgtggt

SEQ ID NO: 462 - DNA, 20 bp, synthetic construct
  source 1..20: mol_type = other DNA
gcgacaaggtgggaccaggg

SEQ ID NO: 463 - DNA, 20 bp, synthetic construct
  source 1..20: mol_type = other DNA
ccggaaatggtgaaactggc

SEQ ID NO: 464 - DNA, 20 bp, synthetic construct
  source 1..20: mol_type = other DNA
ttgatcgtcatcctcctctt

SEQ ID NO: 465 - DNA, 20 bp, synthetic construct
  source 1..20: mol_type = other DNA
gagagcgatgagcagcgagg

SEQ ID NO: 466 - DNA, 20 bp, synthetic construct
  source 1..20: mol_type = other DNA
gattgaatcacattggagga

SEQ ID NO: 467 - DNA, 20 bp, synthetic construct
  source 1..20: mol_type = other DNA
cttaaagtccgcaaaacaac

SEQ ID NO: 468 - DNA, 20 bp, synthetic construct
  source 1..20: mol_type = other DNA
acctgtggcagtttgaagcc

SEQ ID NO: 469 - DNA, 20 bp, synthetic construct
  source 1..20: mol_type = other DNA
ccgtaaaagtcagaagcaca

SEQ ID NO: 470 - DNA, 20 bp, synthetic construct
  source 1..20: mol_type = other DNA
tgggtttattctcatacagc

SEQ ID NO: 471 - DNA, 20 bp, synthetic construct
  source 1..20: mol_type = other DNA
aagtggcagtcaaactcttc

SEQ ID NO: 472 - DNA, 20 bp, synthetic construct
  source 1..20: mol_type = other DNA
agatacatgctgaaaccaac

SEQ ID NO: 473 - DNA, 20 bp, synthetic construct
  source 1..20: mol_type = other DNA
tctagtgtctcaagcttctc

SEQ ID NO: 474 - DNA, 20 bp, synthetic construct
  source 1..20: mol_type = other DNA
atactgcttggtataccaag

SEQ ID NO: 475 - DNA, 20 bp, synthetic construct
  source 1..20: mol_type = other DNA
aagacccgatccaaagcttc

SEQ ID NO: 476 - DNA, 20 bp, synthetic construct
  source 1..20: mol_type = other DNA
atccacgggtgaggagacat

SEQ ID NO: 477 - DNA, 20 bp, synthetic construct
  source 1..20: mol_type = other DNA
catcttgtgtcctgttttct

SEQ ID NO: 478 - DNA, 20 bp, synthetic construct
  source 1..20: mol_type = other DNA
cgatttcagctgcagcagcg

SEQ ID NO: 479 - DNA, 20 bp, synthetic construct
  source 1..20: mol_type = other DNA
tctgcccaagatcaccgtca

SEQ ID NO: 480 - DNA, 20 bp, synthetic construct
  source 1..20: mol_type = other DNA
tcctgttccatctggacaac

SEQ ID NO: 481 - DNA, 20 bp, synthetic construct
  source 1..20: mol_type = other DNA
actgccggctaaagctgcgc

SEQ ID NO: 482 - DNA, 20 bp, synthetic construct
  source 1..20: mol_type = other DNA
aaaaaaagccagaccattgg

SEQ ID NO: 483 - DNA, 20 bp, synthetic construct
  source 1..20: mol_type = other DNA
gacctatgaagatgccaaga

SEQ ID NO: 484 - DNA, 20 bp, synthetic construct
  source 1..20: mol_type = other DNA
cggagaggcataggtcaaca

SEQ ID NO: 485 - DNA, 20 bp, synthetic construct
  source 1..20: mol_type = other DNA
taagcacacctgctaacaac

SEQ ID NO: 486 - DNA, 20 bp, synthetic construct
  source 1..20: mol_type = other DNA
ttggtttccggacatcatgg

SEQ ID NO: 487 - DNA, 20 bp, synthetic construct
  source 1..20: mol_type = other DNA
tggagattttcttccactct

SEQ ID NO: 488 - DNA, 20 bp, synthetic construct
  source 1..20: mol_type = other DNA
ttgcaaagcatttcctcagg

SEQ ID NO: 489 - DNA, 20 bp, synthetic construct
  source 1..20: mol_type = other DNA
cgctggtcagactgctgcta

SEQ ID NO: 490 - DNA, 20 bp, synthetic construct
  source 1..20: mol_type = other DNA
ccacaactgggtcatgattg

SEQ ID NO: 491 - DNA, 20 bp, synthetic construct
  source 1..20: mol_type = other DNA
gacccatgtagaattccagg

SEQ ID NO: 492 - DNA, 20 bp, synthetic construct
  source 1..20: mol_type = other DNA
tgtccgggccgtctcttttc

SEQ ID NO: 493 - DNA, 20 bp, synthetic construct
  source 1..20: mol_type = other DNA
aaactctactccaacagtga

SEQ ID NO: 494 - DNA, 20 bp, synthetic construct
  source 1..20: mol_type = other DNA
acacctggtcaccacaggtc

SEQ ID NO: 495 - DNA, 20 bp, synthetic construct
  source 1..20: mol_type = other DNA
ccggtttaatttttgactcc

SEQ ID NO: 496 - DNA, 20 bp, synthetic construct
  source 1..20: mol_type = other DNA
gaaactcctgggttctcctt

SEQ ID NO: 497 - DNA, 20 bp, synthetic construct
  source 1..20: mol_type = other DNA
gcataggcccagatcatgcc

SEQ ID NO: 498 - DNA, 20 bp, synthetic construct
  source 1..20: mol_type = other DNA
cctctacatgaattcacaac

SEQ ID NO: 499 - DNA, 20 bp, synthetic construct
  source 1..20: mol_type = other DNA
gttggcatcaccagtggtga

SEQ ID NO: 500 - DNA, 20 bp, synthetic construct
  source 1..20: mol_type = other DNA
cagcactataaacagacagg

SEQ ID NO: 501 - DNA, 20 bp, synthetic construct
  source 1..20: mol_type = other DNA
gccattgtcactgctatggt

SEQ ID NO: 502 - DNA, 20 bp, synthetic construct
  source 1..20: mol_type = other DNA
cttgcagaggttaagttctg

SEQ ID NO: 503 - DNA, 20 bp, synthetic construct
  source 1..20: mol_type = other DNA
ggatgttggttaagtttgtg

SEQ ID NO: 504 - DNA, 20 bp, synthetic construct
  source 1..20: mol_type = other DNA
acgtctatgatcatgcccat

SEQ ID NO: 505 - DNA, 20 bp, synthetic construct
  source 1..20: mol_type = other DNA
tgttcttgcccaagaatagc

SEQ ID NO: 506 - DNA, 20 bp, synthetic construct
  source 1..20: mol_type = other DNA
cccgagtaccaaggctgagt

SEQ ID NO: 507 - DNA, 20 bp, synthetic construct
  source 1..20: mol_type = other DNA
agtagaagggcgctgcggcg

SEQ ID NO: 508 - DNA, 20 bp, synthetic construct
  source 1..20: mol_type = other DNA
aaacaatacggagctgagcc

SEQ ID NO: 509 - DNA, 20 bp, synthetic construct
  source 1..20: mol_type = other DNA
cccttcagacctgaaatggg

SEQ ID NO: 510 - DNA, 20 bp, synthetic construct
  source 1..20: mol_type = other DNA
ccactcagccaagaatgagg

SEQ ID NO: 511 - DNA, 20 bp, synthetic construct
  source 1..20: mol_type = other DNA
aagccaatgaggaatgtccc

SEQ ID NO: 512 - DNA, 20 bp, synthetic construct
  source 1..20: mol_type = other DNA
ctggcatgcacaaatgcaca

SEQ ID NO: 513 - DNA, 20 bp, synthetic construct
  source 1..20: mol_type = other DNA
gttgatgacggagaagatgt

SEQ ID NO: 514 - DNA, 20 bp, synthetic construct
  source 1..20: mol_type = other DNA
gtagctctgtttgcccaggg

SEQ ID NO: 515 - DNA, 20 bp, synthetic construct
  source 1..20: mol_type = other DNA
tgaacacttgctgaaactcc

SEQ ID NO: 516 - DNA, 20 bp, synthetic construct
  source 1..20: mol_type = other DNA
agggtaacgtgatgcaatat

SEQ ID NO: 517 - DNA, 20 bp, synthetic construct
  source 1..20: mol_type = other DNA
tatatgtgagcccatcagtg

SEQ ID NO: 518 - DNA, 20 bp, synthetic construct
  source 1..20: mol_type = other DNA
gttagcagatctctgcagct

SEQ ID NO: 519 - DNA, 20 bp, synthetic construct
  source 1..20: mol_type = other DNA
agggagccttgtgtacacgc

SEQ ID NO: 520 - DNA, 20 bp, synthetic construct
  source 1..20: mol_type = other DNA
ggttatcagtgtgatgagca

SEQ ID NO: 521 - DNA, 20 bp, synthetic construct
  source 1..20: mol_type = other DNA
gcactcctttccaaagtttt

SEQ ID NO: 522 - DNA, 20 bp, synthetic construct
  source 1..20: mol_type = other DNA
cttagcttttagagccggga

SEQ ID NO: 523 - DNA, 20 bp, synthetic construct
  source 1..20: mol_type = other DNA
ttcgtagagagagagttggg

SEQ ID NO: 524 - DNA, 20 bp, synthetic construct
  source 1..20: mol_type = other DNA
tgtgcactctgcaatgacct

SEQ ID NO: 525 - DNA, 20 bp, synthetic construct
  source 1..20: mol_type = other DNA
accactttggaagacagttt

SEQ ID NO: 526 - DNA, 20 bp, synthetic construct
  source 1..20: mol_type = other DNA
acatcaccaacgcagtcctt

SEQ ID NO: 527 - DNA, 20 bp, synthetic construct
  source 1..20: mol_type = other DNA
tgttgcagtcgtgggtccca

SEQ ID NO: 528 - DNA, 20 bp, synthetic construct
  source 1..20: mol_type = other DNA
cgttgaaattcagcctcctt

SEQ ID NO: 529 - DNA, 20 bp, synthetic construct
  source 1..20: mol_type = other DNA
ctttggactggagaattttc

SEQ ID NO: 530 - DNA, 20 bp, synthetic construct
  source 1..20: mol_type = other DNA
tccaaatatgagagctggga

SEQ ID NO: 531 - DNA, 20 bp, synthetic construct
  source 1..20: mol_type = other DNA
ctcttctgaccattagtgca

SEQ ID NO: 532 - DNA, 20 bp, synthetic construct
  source 1..20: mol_type = other DNA
acattggtatgagacttcag

SEQ ID NO: 533 - DNA, 20 bp, synthetic construct
  source 1..20: mol_type = other DNA
attatcctcccgatatccac

SEQ ID NO: 534 - DNA, 20 bp, synthetic construct
  source 1..20: mol_type = other DNA
agcaacgtaggagctagagc

SEQ ID NO: 535 - DNA, 20 bp, synthetic construct
  source 1..20: mol_type = other DNA
acggataaatcagatggtct

SEQ ID NO: 536 - DNA, 20 bp, synthetic construct
  source 1..20: mol_type = other DNA
gggtaacgctggcacagctg

SEQ ID NO: 537 - DNA, 20 bp, synthetic construct
  source 1..20: mol_type = other DNA
acgccatggcacttacactc

SEQ ID NO: 538 - DNA, 20 bp, synthetic construct
  source 1..20: mol_type = other DNA
catctcgggtctctgcaccg

SEQ ID NO: 539 - DNA, 20 bp, synthetic construct
  source 1..20: mol_type = other DNA
accaacaaagactctagact

SEQ ID NO: 540 - DNA, 20 bp, synthetic construct
  source 1..20: mol_type = other DNA
gttgctgtaacaaaggagga

SEQ ID NO: 541 - DNA, 20 bp, synthetic construct
  source 1..20: mol_type = other DNA
cgcatcttccttttgtagca

SEQ ID NO: 542 - DNA, 20 bp, synthetic construct
  source 1..20: mol_type = other DNA
tacagcaaggctaagggctc

SEQ ID NO: 543 - DNA, 20 bp, synthetic construct
  source 1..20: mol_type = other DNA
caccaggtttttcaagtaga

SEQ ID NO: 544 - DNA, 20 bp, synthetic construct
  source 1..20: mol_type = other DNA
tgcagtagttctccagctgg

SEQ ID NO: 545 - DNA, 20 bp, synthetic construct
  source 1..20: mol_type = other DNA
gcttgatttgttgcctctca

SEQ ID NO: 546 - DNA, 20 bp, synthetic construct
  source 1..20: mol_type = other DNA
caccctgtgttcctattgcc

SEQ ID NO: 547 - DNA, 20 bp, synthetic construct
  source 1..20: mol_type = other DNA
tgtgcattgtttcgcttagt

SEQ ID NO: 548 - DNA, 20 bp, synthetic construct
  source 1..20: mol_type = other DNA
ttatggcgagttccaacacc

SEQ ID NO: 549 - DNA, 20 bp, synthetic construct
  source 1..20: mol_type = other DNA
cgctggtgaaatttataacc

SEQ ID NO: 550 - DNA, 20 bp, synthetic construct
  source 1..20: mol_type = other DNA
ctggctatggtgtttatagc

SEQ ID NO: 551 - DNA, 20 bp, synthetic construct
  source 1..20: mol_type = other DNA
gtgctgaagaacatgccgtt

SEQ ID NO: 552 - DNA, 20 bp, synthetic construct
  source 1..20: mol_type = other DNA
atccgggaatggccaaccca

SEQ ID NO: 553 - DNA, 20 bp, synthetic construct
  source 1..20: mol_type = other DNA
gtgttgcaagattggagggt

SEQ ID NO: 554 - DNA, 20 bp, synthetic construct
  source 1..20: mol_type = other DNA
catggtcatcaggtacttga

SEQ ID NO: 555 - DNA, 20 bp, synthetic construct
  source 1..20: mol_type = other DNA
atggcaatactgtagtcact

SEQ ID NO: 556 - DNA, 20 bp, synthetic construct
  source 1..20: mol_type = other DNA
atcagggactgttgtagcca

SEQ ID NO: 557 - DNA, 20 bp, synthetic construct
  source 1..20: mol_type = other DNA
gatgatgaaggcgaaggtga

SEQ ID NO: 558 - DNA, 20 bp, synthetic construct
  source 1..20: mol_type = other DNA
tcggtcatgagggaaaatgg

SEQ ID NO: 559 - DNA, 20 bp, synthetic construct
  source 1..20: mol_type = other DNA
gcggctgtagcgtcggaagg

SEQ ID NO: 560 - DNA, 20 bp, synthetic construct
  source 1..20: mol_type = other DNA
tgcctctacagaaccagttt

SEQ ID NO: 561 - DNA, 20 bp, synthetic construct
  source 1..20: mol_type = other DNA
tgaaatggctcctgtttagt

SEQ ID NO: 562 - DNA, 20 bp, synthetic construct
  source 1..20: mol_type = other DNA
agagaagcgcgccggctgag

SEQ ID NO: 563 - DNA, 20 bp, synthetic construct
  source 1..20: mol_type = other DNA
ttgcacatatcctcatcaca

SEQ ID NO: 564 - DNA, 20 bp, synthetic construct
  source 1..20: mol_type = other DNA
tcttctctgcttttgtcttc

SEQ ID NO: 565 - DNA, 20 bp, synthetic construct
  source 1..20: mol_type = other DNA
cttcactcccttctgggaag

SEQ ID NO: 566 - DNA, 20 bp, synthetic construct
  source 1..20: mol_type = other DNA
cacagatttcacatgtgccc

SEQ ID NO: 567 - DNA, 20 bp, synthetic construct
  source 1..20: mol_type = other DNA
gtgtttgcccgtggcccggt

SEQ ID NO: 568 - DNA, 20 bp, synthetic construct
  source 1..20: mol_type = other DNA
tcattgtcatcgatctgcag

SEQ ID NO: 569 - DNA, 20 bp, synthetic construct
  source 1..20: mol_type = other DNA
tcacagctcaagtacacctg

SEQ ID NO: 570 - DNA, 20 bp, synthetic construct
  source 1..20: mol_type = other DNA
aactgttctcgtcgtttccg

SEQ ID NO: 571 - DNA, 20 bp, synthetic construct
  source 1..20: mol_type = other DNA
caaaaaagctccgttttagc

SEQ ID NO: 572 - DNA, 20 bp, synthetic construct
  source 1..20: mol_type = other DNA
gatgtggcttgggtttttct

SEQ ID NO: 573 - DNA, 20 bp, synthetic construct
  source 1..20: mol_type = other DNA
gcctctcccgtcccgagaaa

SEQ ID NO: 574 - DNA, 20 bp, synthetic construct
  source 1..20: mol_type = other DNA
ccttcttgcgatggctctgc

SEQ ID NO: 575 - DNA, 20 bp, synthetic construct
  source 1..20: mol_type = other DNA
catgtaccagaaggtgaggt

SEQ ID NO: 576 - DNA, 20 bp, synthetic construct
  source 1..20: mol_type = other DNA
cggactttatgagcgacaag

SEQ ID NO: 577 - DNA, 20 bp, synthetic construct
  source 1..20: mol_type = other DNA
acagctcttcagtactggtg

SEQ ID NO: 578 - DNA, 20 bp, synthetic construct
  source 1..20: mol_type = other DNA
gtctgaagtcatcccgaagt

SEQ ID NO: 579 - DNA, 20 bp, synthetic construct
  source 1..20: mol_type = other DNA
tgtggttgttgccagtatta

SEQ ID NO: 580 - DNA, 20 bp, synthetic construct
  source 1..20: mol_type = other DNA
tcgggactttggcatctaaa

SEQ ID NO: 581 - DNA, 20 bp, synthetic construct
  source 1..20: mol_type = other DNA
tagaaaatgggctggtaggt

SEQ ID NO: 582 - DNA, 20 bp, synthetic construct
  source 1..20: mol_type = other DNA
gtcttatccgattttcccag

SEQ ID NO: 583 - DNA, 20 bp, synthetic construct
  source 1..20: mol_type = other DNA
actttcccacgatactctat

SEQ ID NO: 584 - DNA, 20 bp, synthetic construct
  source 1..20: mol_type = other DNA
gagagttggtatattcggca

SEQ ID NO: 585 - DNA, 20 bp, synthetic construct
  source 1..20: mol_type = other DNA
aacctgaagctaccaggcag

SEQ ID NO: 586 - DNA, 20 bp, synthetic construct
  source 1..20: mol_type = other DNA
gcatctgtatcaggcaaagt

SEQ ID NO: 587 - DNA, 20 bp, synthetic construct
  source 1..20: mol_type = other DNA
ctgcccaactgtagaaacta

SEQ ID NO: 588 - DNA, 20 bp, synthetic construct
  source 1..20: mol_type = other DNA
agggtgtccagatgagaaga

SEQ ID NO: 589 - DNA, 20 bp, synthetic construct
  source 1..20: mol_type = other DNA
ccaggcccacaggatattca

SEQ ID NO: 590 - DNA, 20 bp, synthetic construct
  source 1..20: mol_type = other DNA
atgtcccggacaatctcacg

SEQ ID NO: 591 - DNA, 20 bp, synthetic construct
  source 1..20: mol_type = other DNA
tatgagcatcaggagagaca

SEQ ID NO: 592 - DNA, 20 bp, synthetic construct
  source 1..20: mol_type = other DNA
cagagagtttagggtaactg

SEQ ID NO: 593 - DNA, 20 bp, synthetic construct
  source 1..20: mol_type = other DNA
cttcagcacagtctctgaag

SEQ ID NO: 594 - DNA, 20 bp, synthetic construct
  source 1..20: mol_type = other DNA
caaactcatttcccagccaa

SEQ ID NO: 595 - DNA, 20 bp, synthetic construct
  source 1..20: mol_type = other DNA
cgtgcttcagcaaggtctcc

SEQ ID NO: 596 - DNA, 20 bp, synthetic construct
  source 1..20: mol_type = other DNA
gactgaggcatttagacacc

SEQ ID NO: 597 - DNA, 20 bp, synthetic construct
  source 1..20: mol_type = other DNA
gctgatgaagacaaagaggg

SEQ ID NO: 598 - DNA, 20 bp, synthetic construct
  source 1..20: mol_type = other DNA
cctgcgtaattgtgtctctt

SEQ ID NO: 599 - DNA, 20 bp, synthetic construct
  source 1..20: mol_type = other DNA
agaaaatgctttcttgaggc

SEQ ID NO: 600 - DNA, 20 bp, synthetic construct
  source 1..20: mol_type = other DNA
atggtaaagcctggtctcgt

SEQ ID NO: 601 - DNA, 20 bp, synthetic construct
  source 1..20: mol_type = other DNA
ttaagcacctgtttcttgca

SEQ ID NO: 602 - DNA, 20 bp, synthetic construct
  source 1..20: mol_type = other DNA
ctagaccctagacatgtaga

SEQ ID NO: 603 - DNA, 20 bp, synthetic construct
  source 1..20: mol_type = other DNA
tcttctcatctgacagctgg

SEQ ID NO: 604 - DNA, 20 bp, synthetic construct
  source 1..20: mol_type = other DNA
accagacagaagatgacaga

SEQ ID NO: 605 - DNA, 20 bp, synthetic construct
  source 1..20: mol_type = other DNA
gtcctccaattcccgcatct

SEQ ID NO: 606 - DNA, 20 bp, synthetic construct
  source 1..20: mol_type = other DNA
gatgtggtctctgagttccc

SEQ ID NO: 607 - DNA, 20 bp, synthetic construct
  source 1..20: mol_type = other DNA
taccacagcttgttcttcat

SEQ ID NO: 608 - DNA, 20 bp, synthetic construct
  source 1..20: mol_type = other DNA
tgggtatccataatcgccat

SEQ ID NO: 609 - DNA, 20 bp, synthetic construct
  source 1..20: mol_type = other DNA
tgtgcggtagcaagtttctc

SEQ ID NO: 610 - DNA, 20 bp, synthetic construct
  source 1..20: mol_type = other DNA
acaggtaacccgggaactac

SEQ ID NO: 611 - DNA, 20 bp, synthetic construct
  source 1..20: mol_type = other DNA
ggcgtagtcgctgaaacttg

SEQ ID NO: 612 - DNA, 20 bp, synthetic construct
  source 1..20: mol_type = other DNA
ggctgtactcgcagctctgg

SEQ ID NO: 613 - DNA, 20 bp, synthetic construct
  source 1..20: mol_type = other DNA
tgatggagcagttgtggatg

SEQ ID NO: 614 - DNA, 20 bp, synthetic construct
  source 1..20: mol_type = other DNA
ttgtgttccggcaagttcca

SEQ ID NO: 615 - DNA, 20 bp, synthetic construct
  source 1..20: mol_type = other DNA
tggtgcacattttctgggtt

SEQ ID NO: 616 - DNA, 20 bp, synthetic construct
  source 1..20: mol_type = other DNA
cgcaggtactgcatgcagtt

SEQ ID NO: 617 - DNA, 20 bp, synthetic construct
  source 1..20: mol_type = other DNA
tgggcgtttagagttataca

SEQ ID NO: 618 - DNA, 20 bp, synthetic construct
  source 1..20: mol_type = other DNA
aagatgcctacgcatccatt

SEQ ID NO: 619 - DNA, 20 bp, synthetic construct
  source 1..20: mol_type = other DNA
tgcacccatcctgtcaaggt

SEQ ID NO: 620 - DNA, 20 bp, synthetic construct
  source 1..20: mol_type = other DNA
tgtacagctctccgaaggcg

SEQ ID NO: 621 - DNA, 20 bp, synthetic construct
  source 1..20: mol_type = other DNA
aaataggtggtgtccacagc

SEQ ID NO: 622 - DNA, 20 bp, synthetic construct
  source 1..20: mol_type = other DNA
aacacagcggcagccaccgc

SEQ ID NO: 623 - DNA, 20 bp, synthetic construct
  source 1..20: mol_type = other DNA
cttactgttctgcagatact

SEQ ID NO: 624 - DNA, 20 bp, synthetic construct
  source 1..20: mol_type = other DNA
gggcagatcaagagaaacac

SEQ ID NO: 625 - DNA, 20 bp, synthetic construct
  source 1..20: mol_type = other DNA
tcccggatctgctgctccat

SEQ ID NO: 626 - DNA, 20 bp, synthetic construct
  source 1..20: mol_type = other DNA
gtccacatgctggccaccta

SEQ ID NO: 627 - DNA, 20 bp, synthetic construct
  source 1..20: mol_type = other DNA
atactgcctagttcactagc

SEQ ID NO: 628 - DNA, 20 bp, synthetic construct
  source 1..20: mol_type = other DNA
gattgaaatgacaggtagcc

SEQ ID NO: 629 - DNA, 20 bp, synthetic construct
  source 1..20: mol_type = other DNA
ctcgtgggagcacttcacta

SEQ ID NO: 630 - DNA, 20 bp, synthetic construct
  source 1..20: mol_type = other DNA
aagacccgtggctgttgagg

SEQ ID NO: 631 - DNA, 20 bp, synthetic construct
  source 1..20: mol_type = other DNA
ggtttctgagatgcgattgc

SEQ ID NO: 632 - DNA, 20 bp, synthetic construct
  source 1..20: mol_type = other DNA
ccagtaaaaggttttgcaca

SEQ ID NO: 633 - DNA, 20 bp, synthetic construct
  source 1..20: mol_type = other DNA
taatttctggaatgcacgag

SEQ ID NO: 634 - DNA, 20 bp, synthetic construct
  source 1..20: mol_type = other DNA
ccggccaaacttagtcccag

SEQ ID NO: 635 - DNA, 20 bp, synthetic construct
  source 1..20: mol_type = other DNA
ccattcgccacccaacccgc

SEQ ID NO: 636 - DNA, 20 bp, synthetic construct
  source 1..20: mol_type = other DNA
gtctctcggttggctaagtc

SEQ ID NO: 637 - DNA, 20 bp, synthetic construct
  source 1..20: mol_type = other DNA
gttgatggtcctgatcgaga

SEQ ID NO: 638 - DNA, 20 bp, synthetic construct
  source 1..20: mol_type = other DNA
cctccggcaaagactcatgt

SEQ ID NO: 639 - DNA, 20 bp, synthetic construct
  source 1..20: mol_type = other DNA
catcctgagctagctgaaca

SEQ ID NO: 640 - DNA, 20 bp, synthetic construct
  source 1..20: mol_type = other DNA
tccaatatcactgtgggaga

SEQ ID NO: 641 - DNA, 20 bp, synthetic construct
  source 1..20: mol_type = other DNA
tccagccacaaggtcctttc

SEQ ID NO: 642 - DNA, 20 bp, synthetic construct
  source 1..20: mol_type = other DNA
ggtagacaccacgctcaggg

SEQ ID NO: 643 - DNA, 20 bp, synthetic construct
  source 1..20: mol_type = other DNA
ctccagaaactgctagtgac

SEQ ID NO: 644 - DNA, 20 bp, synthetic construct
  source 1..20: mol_type = other DNA
ctgtgacgctctcaacttca

SEQ ID NO: 645 - DNA, 20 bp, synthetic construct
  source 1..20: mol_type = other DNA
gccttctcctcgtactgctg

SEQ ID NO: 646 - DNA, 20 bp, synthetic construct
  source 1..20: mol_type = other DNA
cgcaccaatacggcttcttt

SEQ ID NO: 647 - DNA, 20 bp, synthetic construct
  source 1..20: mol_type = other DNA
aggccacttatacgtgattt

SEQ ID NO: 648 - DNA, 20 bp, synthetic construct
  source 1..20: mol_type = other DNA
agctcacggttcaacatcct

SEQ ID NO: 649 - DNA, 20 bp, synthetic construct
  source 1..20: mol_type = other DNA
gtaatccgacacgcaaaaga

SEQ ID NO: 650 - DNA, 20 bp, synthetic construct
  source 1..20: mol_type = other DNA
aaaaaggccgctgttgtttt

SEQ ID NO: 651 - DNA, 20 bp, synthetic construct
  source 1..20: mol_type = other DNA
catcattagggaggaagccc

SEQ ID NO: 652 - DNA, 20 bp, synthetic construct
  source 1..20: mol_type = other DNA
gtttccgctcatcggtctcc

SEQ ID NO: 653 - DNA, 20 bp, synthetic construct
  source 1..20: mol_type = other DNA
actaaagaggcggtcaataa

SEQ ID NO: 654 - DNA, 20 bp, synthetic construct
  source 1..20: mol_type = other DNA
ggaaggataaaacgcggtcc

SEQ ID NO: 655 - DNA, 20 bp, synthetic construct
  source 1..20: mol_type = other DNA
acatagcgactcgttaactg

SEQ ID NO: 656 - DNA, 20 bp, synthetic construct
  source 1..20: mol_type = other DNA
gattttggacaagagcatcc

SEQ ID NO: 657 - DNA, 20 bp, synthetic construct
  source 1..20: mol_type = other DNA
tcctgcttggcgagacgtgt

SEQ ID NO: 658 - DNA, 20 bp, synthetic construct
  source 1..20: mol_type = other DNA
ccttcagggcatctgatagg

SEQ ID NO: 659 - DNA, 20 bp, synthetic construct
  source 1..20: mol_type = other DNA
gggagtgcatacacacgtgc

SEQ ID NO: 660 - DNA, 20 bp, synthetic construct
  source 1..20: mol_type = other DNA
tgatccatgctgagagtatc

SEQ ID NO: 661 - DNA, 20 bp, synthetic construct
  source 1..20: mol_type = other DNA
gtgaactttacatccctctt

SEQ ID NO: 662 - DNA, 20 bp, synthetic construct
  source 1..20: mol_type = other DNA
gcacccgacagacacgggct

SEQ ID NO: 663 - DNA, 20 bp, synthetic construct
  source 1..20: mol_type = other DNA
tcaccaactgagtctggctt

SEQ ID NO: 664 - DNA, 20 bp, synthetic construct
  source 1..20: mol_type = other DNA
ctgtgactctctgctgtaag

SEQ ID NO: 665 - DNA, 20 bp, synthetic construct
  source 1..20: mol_type = other DNA
ttcttgtctcatttgttggg

SEQ ID NO: 666 - DNA, 20 bp, synthetic construct
  source 1..20: mol_type = other DNA
caactgccgcaggcgggatc

SEQ ID NO: 667 - DNA, 20 bp, synthetic construct
  source 1..20: mol_type = other DNA
ggcaaattagtagccacaat

SEQ ID NO: 668 - DNA, 20 bp, synthetic construct
  source 1..20: mol_type = other DNA
acatgagcgacaaactcaag

SEQ ID NO: 669 - DNA, 20 bp, synthetic construct
  source 1..20: mol_type = other DNA
tgcccacatctttttctctc

SEQ ID NO: 670 - DNA, 20 bp, synthetic construct
  source 1..20: mol_type = other DNA
cattcaacctgggctggtcc

SEQ ID NO: 671 - DNA, 20 bp, synthetic construct
  source 1..20: mol_type = other DNA
gcccaagtgtgatggttcta

SEQ ID NO: 672 - DNA, 20 bp, synthetic construct
  source 1..20: mol_type = other DNA
tggaaaggcagaaggcttga

SEQ ID NO: 673 - DNA, 20 bp, synthetic construct
  source 1..20: mol_type = other DNA
cactccttgtgctaggaggg

SEQ ID NO: 674 - DNA, 20 bp, synthetic construct
  source 1..20: mol_type = other DNA
aacagtcaacctccttctcc

SEQ ID NO: 675 - DNA, 20 bp, synthetic construct
  source 1..20: mol_type = other DNA
actgatgacactgcctggca

SEQ ID NO: 676 - DNA, 20 bp, synthetic construct
  source 1..20: mol_type = other DNA
tgctgtagcactcttcctgc

SEQ ID NO: 677 - DNA, 20 bp, synthetic construct
  source 1..20: mol_type = other DNA
tggttggacagccaggctca

SEQ ID NO: 678 - DNA, 20 bp, synthetic construct
  source 1..20: mol_type = other DNA
acgttcacactgttttgtct

SEQ ID NO: 679 - DNA, 20 bp, synthetic construct
  source 1..20: mol_type = other DNA
gactgatttgatgtagccgg

SEQ ID NO: 680 - DNA, 20 bp, synthetic construct
  source 1..20: mol_type = other DNA
tccgattgtatgtgagccaa

SEQ ID NO: 681 - DNA, 20 bp, synthetic construct
  source 1..20: mol_type = other DNA
agctaaggatgctcccagat

SEQ ID NO: 682 - DNA, 20 bp, synthetic construct
  source 1..20: mol_type = other DNA
ccgttcagctgcatcccatg

SEQ ID NO: 683 - DNA, 20 bp, synthetic construct
  source 1..20: mol_type = other DNA
taatcgcactggtcaaagcc

SEQ ID NO: 684 - DNA, 20 bp, synthetic construct
  source 1..20: mol_type = other DNA
ctttgcgttcaaggtcaaga

SEQ ID NO: 685 - DNA, 20 bp, synthetic construct
  source 1..20: mol_type = other DNA
ttggtagttagcagcttcaa

SEQ ID NO: 686 - DNA, 20 bp, synthetic construct
  source 1..20: mol_type = other DNA
agaatcacctccaggtcctg

SEQ ID NO: 687 - DNA, 20 bp, synthetic construct
  source 1..20: mol_type = other DNA
gagggaccttacgagctccc

SEQ ID NO: 688 - DNA, 20 bp, synthetic construct
  source 1..20: mol_type = other DNA
tgcctttcacttggttgaag

SEQ ID NO: 689 - DNA, 20 bp, synthetic construct
  source 1..20: mol_type = other DNA
ttaacagcccaaaaaggcag

SEQ ID NO: 690 - DNA, 20 bp, synthetic construct
  source 1..20: mol_type = other DNA
gatgatccagcatggttttc

SEQ ID NO: 691 - DNA, 20 bp, synthetic construct
  source 1..20: mol_type = other DNA
cttcattggtgaaggatgtc

SEQ ID NO: 692 - DNA, 20 bp, synthetic construct
  source 1..20: mol_type = other DNA
gttgtggagcaatacggtac

SEQ ID NO: 693 - DNA, 20 bp, synthetic construct
  source 1..20: mol_type = other DNA
acatgtcagtcttgatgacc

SEQ ID NO: 694 - DNA, 20 bp, synthetic construct
  source 1..20: mol_type = other DNA
gagtgagtgttcaagtcttc

SEQ ID NO: 695 - DNA, 20 bp, synthetic construct
  source 1..20: mol_type = other DNA
tctttgggacacttgctgct

SEQ ID NO: 696 - DNA, 20 bp, synthetic construct
  source 1..20: mol_type = other DNA
agcaatgaggatgacagcga

SEQ ID NO: 697 - DNA, 20 bp, synthetic construct
  source 1..20: mol_type = other DNA
tgacaaagcagcgcctcaga

SEQ ID NO: 698 - DNA, 20 bp, synthetic construct
  source 1..20: mol_type = other DNA
aatcacacatctgtgaagcc

SEQ ID NO: 699 - DNA, 20 bp, synthetic construct
  source 1..20: mol_type = other DNA
agacccactcatttgcagca

SEQ ID NO: 700 - DNA, 20 bp, synthetic construct
  source 1..20: mol_type = other DNA
tgcaggtgtaatgaagacct

SEQ ID NO: 701 - DNA, 20 bp, synthetic construct
  source 1..20: mol_type = other DNA
aaggaaagacatttcccttc

SEQ ID NO: 702 - DNA, 20 bp, synthetic construct
  source 1..20: mol_type = other DNA
cttgcgagatgagcgaatgg

SEQ ID NO: 703 - DNA, 20 bp, synthetic construct
  source 1..20: mol_type = other DNA
ccttagctcctgagtttaag

SEQ ID NO: 704 - DNA, 20 bp, synthetic construct
  source 1..20: mol_type = other DNA
cgtcagttccttgaggcggg

SEQ ID NO: 705 - DNA, 20 bp, synthetic construct
  source 1..20: mol_type = other DNA
cgaaaagtcctcaacgtcct

SEQ ID NO: 706 - DNA, 20 bp, synthetic construct
  source 1..20: mol_type = other DNA
actccatctaccagtctcag

SEQ ID NO: 707 - DNA, 20 bp, synthetic construct
  source 1..20: mol_type = other DNA
acagtaatggtgaagggact

SEQ ID NO: 708 - DNA, 20 bp, synthetic construct
  source 1..20: mol_type = other DNA
ggactcccgagaccaggtca

SEQ ID NO: 709 - DNA, 20 bp, synthetic construct
  source 1..20: mol_type = other DNA
ctgaaagaagccttctgggc

SEQ ID NO: 710 - DNA, 20 bp, synthetic construct
  source 1..20: mol_type = other DNA
cggttgccttgatcccactc

SEQ ID NO: 711 - DNA, 20 bp, synthetic construct
  source 1..20: mol_type = other DNA
ttgacgggtttttcctgtcc

SEQ ID NO: 712 - DNA, 20 bp, synthetic construct
  source 1..20: mol_type = other DNA
ggaatacttcagtggctgag

SEQ ID NO: 713 - DNA, 20 bp, synthetic construct
  source 1..20: mol_type = other DNA
gtccagatgacttcggcctt

SEQ ID NO: 714 - DNA, 20 bp, synthetic construct
  source 1..20: mol_type = other DNA
agaccacattggcctatttc

SEQ ID NO: 715 - DNA, 20 bp, synthetic construct
  source 1..20: mol_type = other DNA
tgctcacgaagcaggtgaag

SEQ ID NO: 716 - DNA, 20 bp, synthetic construct
  source 1..20: mol_type = other DNA
atgtgggtctttcgcagcag

SEQ ID NO: 717 - DNA, 20 bp, synthetic construct
  source 1..20: mol_type = other DNA
tcattgcccaatttcccatc

SEQ ID NO: 718 - DNA, 20 bp, synthetic construct
  source 1..20: mol_type = other DNA
ggtggctcagttagttaacc

SEQ ID NO: 719 - DNA, 20 bp, synthetic construct
  source 1..20: mol_type = other DNA
ctgctgtgcacttgaatttt

SEQ ID NO: 720 - DNA, 20 bp, synthetic construct
  source 1..20: mol_type = other DNA
atcatcggtcttcagatgct

SEQ ID NO: 721 - DNA, 20 bp, synthetic construct
  source 1..20: mol_type = other DNA
accagttgttgggttctgtg

SEQ ID NO: 722 - DNA, 20 bp, synthetic construct
  source 1..20: mol_type = other DNA
aggtgtccttggaaggattc

SEQ ID NO: 723 - DNA, 20 bp, synthetic construct
  source 1..20: mol_type = other DNA
tgttgtagtttcttggtagg

SEQ ID NO: 724 - DNA, 20 bp, synthetic construct
  source 1..20: mol_type = other DNA
ttgttcctgggagcttctcc

SEQ ID NO: 725 - DNA, 20 bp, synthetic construct
  source 1..20: mol_type = other DNA
gaatactgaaacagggttgt

SEQ ID NO: 726 - DNA, 20 bp, synthetic construct
  source 1..20: mol_type = other DNA
gattgagagacactgttgtt

SEQ ID NO: 727 - DNA, 20 bp, synthetic construct
  source 1..20: mol_type = other DNA
ttcccaccgttccctctacc

SEQ ID NO: 728 - DNA, 20 bp, synthetic construct
  source 1..20: mol_type = other DNA
aagagactctgaatttgggc

SEQ ID NO: 729 - DNA, 20 bp, synthetic construct
  source 1..20: mol_type = other DNA
aattccttcagtgacaggtg

SEQ ID NO: 730 - DNA, 20 bp, synthetic construct
  source 1..20: mol_type = other DNA
cggagaagttacatccaaag

SEQ ID NO: 731 - DNA, 20 bp, synthetic construct
  source 1..20: mol_type = other DNA
ttgttgctcatggtgtagta

SEQ ID NO: 732 - DNA, 20 bp, synthetic construct
  source 1..20: mol_type = other DNA
gttagacgttctagagcctg

SEQ ID NO: 733 - DNA, 20 bp, synthetic construct
  source 1..20: mol_type = other DNA
tcgaaagcagatgacacatt

SEQ ID NO: 734 - DNA, 20 bp, synthetic construct
  source 1..20: mol_type = other DNA
agcgggtgccatcacggtta

SEQ ID NO: 735 - DNA, 20 bp, synthetic construct
  source 1..20: mol_type = other DNA
ctgtgttgtttgctgcacag

SEQ ID NO: 736 - DNA, 20 bp, synthetic construct
  source 1..20: mol_type = other DNA
aaccaaggccagtagcattc

SEQ ID NO: 737 - DNA, 20 bp, synthetic construct
  source 1..20: mol_type = other DNA
tggtgcttaaacacaagtgt

SEQ ID NO: 738 - DNA, 20 bp, synthetic construct
  source 1..20: mol_type = other DNA
cccggttcattgtggccttg

SEQ ID NO: 739 - DNA, 20 bp, synthetic construct
  source 1..20: mol_type = other DNA
cctgggtaacccgttttaca

SEQ ID NO: 740 - DNA, 20 bp, synthetic construct
  source 1..20: mol_type = other DNA
aactttggacagatgactca

SEQ ID NO: 741 - DNA, 20 bp, synthetic construct
  source 1..20: mol_type = other DNA
gtcctcccagaattcatggc

SEQ ID NO: 742 - DNA, 20 bp, synthetic construct
  source 1..20: mol_type = other DNA
ccaatggtgcatccagctct

SEQ ID NO: 743 - DNA, 20 bp, synthetic construct
  source 1..20: mol_type = other DNA
ggccacgtgtagttgccatg

SEQ ID NO: 744 - DNA, 20 bp, synthetic construct
  source 1..20: mol_type = other DNA
gatgatcagcgtaccattgg

SEQ ID NO: 745 - DNA, 20 bp, synthetic construct
  source 1..20: mol_type = other DNA
gctcttcaacagaaacattg

SEQ ID NO: 746 - DNA, 20 bp, synthetic construct
  source 1..20: mol_type = other DNA
cttctttcacttccttggtc

SEQ ID NO: 747 - DNA, 20 bp, synthetic construct
  source 1..20: mol_type = other DNA
cggcccatatacttggaatg

SEQ ID NO: 748 - DNA, 20 bp, synthetic construct
  source 1..20: mol_type = other DNA
ttcatctggtggatgcgaat

SEQ ID NO: 749 - DNA, 20 bp, synthetic construct
  source 1..20: mol_type = other DNA
aaccagtgacaggagaagga

SEQ ID NO: 750 - DNA, 20 bp, synthetic construct
  source 1..20: mol_type = other DNA
gttaagctcaccacttcatt

SEQ ID NO: 751 - DNA, 20 bp, synthetic construct
  source 1..20: mol_type = other DNA
gggatacaggtctctctccc

SEQ ID NO: 752 - DNA, 20 bp, synthetic construct
  source 1..20: mol_type = other DNA
ggtggactaaaggatctcat

SEQ ID NO: 753 - DNA, 20 bp, synthetic construct
  source 1..20: mol_type = other DNA
gctgttaataatcccatgca

SEQ ID NO: 754 - DNA, 20 bp, synthetic construct
  source 1..20: mol_type = other DNA
agcgtggaaccttcctttaa

SEQ ID NO: 755 - DNA, 20 bp, synthetic construct
  source 1..20: mol_type = other DNA
ggtcaccgttgctcctggct

SEQ ID NO: 756 - DNA, 20 bp, synthetic construct
  source 1..20: mol_type = other DNA
tgcttccagcaccgggtctg

SEQ ID NO: 757 - DNA, 20 bp, synthetic construct
  source 1..20: mol_type = other DNA
acctcagtggctttgcctgg

SEQ ID NO: 758 - DNA, 20 bp, synthetic construct
  source 1..20: mol_type = other DNA
tgtgggtctcctggagtaag

SEQ ID NO: 759 - DNA, 20 bp, synthetic construct
  source 1..20: mol_type = other DNA
tttatgcaactgtgccactg

SEQ ID NO: 760 - DNA, 20 bp, synthetic construct
  source 1..20: mol_type = other DNA
tgccataaggaagttcagtg

SEQ ID NO: 761 - DNA, 20 bp, synthetic construct
  source 1..20: mol_type = other DNA
cacaccgtggtgctgtcctg

SEQ ID NO: 762 - DNA, 20 bp, synthetic construct
  source 1..20: mol_type = other DNA
aggtgccgccatttcgagtt

SEQ ID NO: 763 - DNA, 20 bp, synthetic construct
  source 1..20: mol_type = other DNA
actctgggtgaacatacatt

SEQ ID NO: 764 - DNA, 20 bp, synthetic construct
  source 1..20: mol_type = other DNA
cccagaagccctctcctttt

SEQ ID NO: 765 - DNA, 20 bp, synthetic construct
  source 1..20: mol_type = other DNA
tggcactggtaactgccctc

SEQ ID NO: 766 - DNA, 20 bp, synthetic construct
  source 1..20: mol_type = other DNA
acctagacaggtccttcagc

SEQ ID NO: 767 - DNA, 20 bp, synthetic construct
  source 1..20: mol_type = other DNA
ggagttggcgaagctggtgc

SEQ ID NO: 768 - DNA, 20 bp, synthetic construct
  source 1..20: mol_type = other DNA
ggccttccaagttctgagtc

SEQ ID NO: 769 - DNA, 20 bp, synthetic construct
  source 1..20: mol_type = other DNA
aattttcaaccagtatggcc

SEQ ID NO: 770 - DNA, 20 bp, synthetic construct
  source 1..20: mol_type = other DNA
ttgcagacacttggtgttcg

SEQ ID NO: 771 - DNA, 20 bp, synthetic construct
  source 1..20: mol_type = other DNA
aaccacatactccactgtgg

SEQ ID NO: 772 - DNA, 20 bp, synthetic construct
  source 1..20: mol_type = other DNA
ctgaacattgggtggtgtcc

SEQ ID NO: 773 - DNA, 20 bp, synthetic construct
  source 1..20: mol_type = other DNA
caccatttgccagcagtggg

SEQ ID NO: 774 - DNA, 20 bp, synthetic construct
  source 1..20: mol_type = other DNA
ctctttctcgtcctgccggg

SEQ ID NO: 775 - DNA, 20 bp, synthetic construct
  source 1..20: mol_type = other DNA
cttcatgatactgctcctgc

SEQ ID NO: 776 - DNA, 20 bp, synthetic construct
  source 1..20: mol_type = other DNA
actatcgtcagacaggtcct

SEQ ID NO: 777 - DNA, 20 bp, synthetic construct
  source 1..20: mol_type = other DNA
aaggactacacagctcaccc

SEQ ID NO: 778 - DNA, 20 bp, synthetic construct
  source 1..20: mol_type = other DNA
aaggctagtaagtttcccac

SEQ ID NO: 779 - DNA, 20 bp, synthetic construct
  source 1..20: mol_type = other DNA
tttgcagcagatctgagaat

SEQ ID NO: 780 - DNA, 20 bp, synthetic construct
  source 1..20: mol_type = other DNA
aaagggcttccagaatctcc

SEQ ID NO: 781 - DNA, 20 bp, synthetic construct
  source 1..20: mol_type = other DNA
tggctgggtcatagcatgga

SEQ ID NO: 782 - DNA, 20 bp, synthetic construct
  source 1..20: mol_type = other DNA
ttattcagttgctggcacct

SEQ ID NO: 783 - DNA, 20 bp, synthetic construct
  source 1..20: mol_type = other DNA
ctacgtccttacacacgagg

SEQ ID NO: 784 - DNA, 20 bp, synthetic construct
  source 1..20: mol_type = other DNA
cctgtgatgaaggaagaaga

SEQ ID NO: 785 - DNA, 20 bp, synthetic construct
  source 1..20: mol_type = other DNA
gcgagtgtgggtgcaatggg

SEQ ID NO: 786 - DNA, 20 bp, synthetic construct
  source 1..20: mol_type = other DNA
agaagggctatgcactggca

SEQ ID NO: 787 - DNA, 20 bp, synthetic construct
  source 1..20: mol_type = other DNA
attcacatccctttcatcag

SEQ ID NO: 788 - DNA, 20 bp, synthetic construct
  source 1..20: mol_type = other DNA
attgccagctttgtaaagcc

SEQ ID NO: 789 - DNA, 20 bp, synthetic construct
  source 1..20: mol_type = other DNA
gcgctctgttgggagtcagt

SEQ ID NO: 790 - DNA, 20 bp, synthetic construct
  source 1..20: mol_type = other DNA
gttttgttctcacagctgtg

SEQ ID NO: 791 - DNA, 20 bp, synthetic construct
  source 1..20: mol_type = other DNA
ggcgcttccattggtgggcg

SEQ ID NO: 792 - DNA, 20 bp, synthetic construct
  source 1..20: mol_type = other DNA
aactagacgtgcaaggcgct

SEQ ID NO: 793 - DNA, 20 bp, synthetic construct
  source 1..20: mol_type = other DNA
agaacaaaacgtccatgttc

SEQ ID NO: 794 - DNA, 20 bp, synthetic construct
  source 1..20: mol_type = other DNA
ttatccgctacatctgaatg

SEQ ID NO: 795 - DNA, 20 bp, synthetic construct
  source 1..20: mol_type = other DNA
gtattgctttgcgttggaca

SEQ ID NO: 796 - DNA, 20 bp, synthetic construct
  source 1..20: mol_type = other DNA
cgcgttccacaaggacctgg

SEQ ID NO: 797 - DNA, 20 bp, synthetic construct
  source 1..20: mol_type = other DNA
cattctggcgggtccaggag

SEQ ID NO: 798 - DNA, 20 bp, synthetic construct
  source 1..20: mol_type = other DNA
tgggtttaccggtggacttg

SEQ ID NO: 799 - DNA, 20 bp, synthetic construct
  source 1..20: mol_type = other DNA
atggagttccaggactctat

SEQ ID NO: 800 - DNA, 20 bp, synthetic construct
  source 1..20: mol_type = other DNA
caaaccacacagacggaggg

SEQ ID NO: 801 - DNA, 20 bp, synthetic construct
  source 1..20: mol_type = other DNA
agggttctgtctgagttctg

SEQ ID NO: 802 - DNA, 20 bp, synthetic construct
  source 1..20: mol_type = other DNA
aagcgtggtcaggcttggaa

SEQ ID NO: 803 - DNA, 20 bp, synthetic construct
  source 1..20: mol_type = other DNA
gatggatgagtttgtgcctg

SEQ ID NO: 804 - DNA, 20 bp, synthetic construct
  source 1..20: mol_type = other DNA
ctctaatgagtttagtccga

SEQ ID NO: 805 - DNA, 20 bp, synthetic construct
  source 1..20: mol_type = other DNA
aactgacgcggcctgcctga

SEQ ID NO: 806 - DNA, 20 bp, synthetic construct
  source 1..20: mol_type = other DNA
gcgggctttaagtgagtagg

SEQ ID NO: 807 - DNA, 20 bp, synthetic construct
  source 1..20: mol_type = other DNA
cgctttttattctgcggaaa

SEQ ID NO: 808 - DNA, 20 bp, synthetic construct
  source 1..20: mol_type = other DNA
gtatccctggacgcactgat

SEQ ID NO: 809 - DNA, 20 bp, synthetic construct
  source 1..20: mol_type = other DNA
gcatctgtgggtctccacgt

SEQ ID NO: 810 - DNA, 20 bp, synthetic construct
  source 1..20: mol_type = other DNA
cacctgaaactcatactggg

SEQ ID NO: 811 - DNA, 20 bp, synthetic construct
  source 1..20: mol_type = other DNA
agaccagtgatgattttcac

SEQ ID NO: 812 - DNA, 20 bp, synthetic construct
  source 1..20: mol_type = other DNA
ggatgtaccgaatttgtttg

SEQ ID NO: 813 - DNA, 20 bp, synthetic construct
  source 1..20: mol_type = other DNA
ctcaggtcaaaaggagcctc

SEQ ID NO: 814 - DNA, 20 bp, synthetic construct
  source 1..20: mol_type = other DNA
agataaggtccattcatcca

SEQ ID NO: 815 - DNA, 20 bp, synthetic construct
  source 1..20: mol_type = other DNA
tcactggtgctgtccggcac

SEQ ID NO: 816 - DNA, 20 bp, synthetic construct
  source 1..20: mol_type = other DNA
cgactaaggagtggcgagct

SEQ ID NO: 817 - DNA, 20 bp, synthetic construct
  source 1..20: mol_type = other DNA
agtgagagggcaagcgctcc

SEQ ID NO: 818 - DNA, 20 bp, synthetic construct
  source 1..20: mol_type = other DNA
ttctctgaggccgtgaagtt

SEQ ID NO: 819 - DNA, 20 bp, synthetic construct
  source 1..20: mol_type = other DNA
cgctgtccacacggaaggct

SEQ ID NO: 820 - DNA, 20 bp, synthetic construct
  source 1..20: mol_type = other DNA
gtccatgatgtcgtcagccg

SEQ ID NO: 821 - DNA, 20 bp, synthetic construct
  source 1..20: mol_type = other DNA
atgttgttttcagccagctt

SEQ ID NO: 822 - DNA, 20 bp, synthetic construct
  source 1..20: mol_type = other DNA
tcctggaagtaatccgggca

SEQ ID NO: 823 - DNA, 20 bp, synthetic construct
  source 1..20: mol_type = other DNA
tggacactaggaatgtgtaa

SEQ ID NO: 824 - DNA, 20 bp, synthetic construct
  source 1..20: mol_type = other DNA
accaatcagcaaaggagtga

SEQ ID NO: 825 - DNA, 20 bp, synthetic construct
  source 1..20: mol_type = other DNA
tttgtcacgtatcaggttct

SEQ ID NO: 826 - DNA, 20 bp, synthetic construct
  source 1..20: mol_type = other DNA
cactttatttctcacaggtg

SEQ ID NO: 827 - DNA, 20 bp, synthetic construct
  source 1..20: mol_type = other DNA
aattgttgaagctgagctgg

SEQ ID NO: 828 - DNA, 20 bp, synthetic construct
  source 1..20: mol_type = other DNA
ccattctgattggcatagta

SEQ ID NO: 829 - DNA, 20 bp, synthetic construct
  source 1..20: mol_type = other DNA
gacaaaacctttgtgaacag

SEQ ID NO: 830 - DNA, 20 bp, synthetic construct
  source 1..20: mol_type = other DNA
ggataccatatacccagtgc

SEQ ID NO: 831 - DNA, 20 bp, synthetic construct
  source 1..20: mol_type = other DNA
cccagtcggaggctctgaga

SEQ ID NO: 832 - DNA, 20 bp, synthetic construct
  source 1..20: mol_type = other DNA
caaagtggccgtcgtggctg

SEQ ID NO: 833 - DNA, 20 bp, synthetic construct
  source 1..20: mol_type = other DNA
cctgttagaaagcatttctg

SEQ ID NO: 834 - DNA, 20 bp, synthetic construct
  source 1..20: mol_type = other DNA
acacccacatttgaagtagc

SEQ ID NO: 835 - DNA, 20 bp, synthetic construct
  source 1..20: mol_type = other DNA
gaatgacagaggcaaaaacc

SEQ ID NO: 836 - DNA, 20 bp, synthetic construct
  source 1..20: mol_type = other DNA
gacagaaaactggattctgc

SEQ ID NO: 837 - DNA, 20 bp, synthetic construct
  source 1..20: mol_type = other DNA
agattgcatagcaatagggc

SEQ ID NO: 838 - DNA, 20 bp, synthetic construct
  source 1..20: mol_type = other DNA
ggagaaggtcataggaattt

SEQ ID NO: 839 - DNA, 20 bp, synthetic construct
  source 1..20: mol_type = other DNA
cccgtgccaggattctgccc

SEQ ID NO: 840 - DNA, 20 bp, synthetic construct
  source 1..20: mol_type = other DNA
gttgtttcgggcttcaggcc

SEQ ID NO: 841 - DNA, 20 bp, synthetic construct
  source 1..20: mol_type = other DNA
gttcatgtccgggatgtaga

SEQ ID NO: 842 - DNA, 20 bp, synthetic construct
  source 1..20: mol_type = other DNA
gacaaatggaatgccagtgt

SEQ ID NO: 843 - DNA, 20 bp, synthetic construct
  source 1..20: mol_type = other DNA
atcggtgctcaaagcaatca

SEQ ID NO: 844 - DNA, 20 bp, synthetic construct
  source 1..20: mol_type = other DNA
tacccagaggaagctataga

SEQ ID NO: 845 - DNA, 20 bp, synthetic construct
  source 1..20: mol_type = other DNA
tatcaaaggccttgactact

SEQ ID NO: 846 - DNA, 20 bp, synthetic construct
  source 1..20: mol_type = other DNA
gtgttggagaagctgcaggt

SEQ ID NO: 847 - DNA, 20 bp, synthetic construct
  source 1..20: mol_type = other DNA
tggactctcttgatggtgcg

SEQ ID NO: 848 - DNA, 20 bp, synthetic construct
  source 1..20: mol_type = other DNA
gcagaggttacggcagtttg

SEQ ID NO: 849 - DNA, 20 bp, synthetic construct
  source 1..20: mol_type = other DNA
gtgggagtggtcttccatta

SEQ ID NO: 850 - DNA, 20 bp, synthetic construct
  source 1..20: mol_type = other DNA
gtagctgcacgtgttccgtg

SEQ ID NO: 851 - DNA, 20 bp, synthetic construct
  source 1..20: mol_type = other DNA
tctgacacgcagccaggttt

SEQ ID NO: 852 - DNA, 20 bp, synthetic construct
  source 1..20: mol_type = other DNA
tggatgtagttcttgtggca

SEQ ID NO: 853 - DNA, 20 bp, synthetic construct
  source 1..20: mol_type = other DNA
gtcgttgcggatgctacgag

SEQ ID NO: 854 - DNA, 20 bp, synthetic construct
  source 1..20: mol_type = other DNA
tgttgacctgggcctcgaca

SEQ ID NO: 855 - DNA, 20 bp, synthetic construct
  source 1..20: mol_type = other DNA
ctgtcttgaaaaactgatgc

SEQ ID NO: 856 - DNA, 20 bp, synthetic construct
  source 1..20: mol_type = other DNA
gcgggaagaacttgcattga

SEQ ID NO: 857 - DNA, 20 bp, synthetic construct
  source 1..20: mol_type = other DNA
gtggaaggtgttgatgatgg

SEQ ID NO: 858 - DNA, 20 bp, synthetic construct
  source 1..20: mol_type = other DNA
agggtgagtacagtccatgg

SEQ ID NO: 859 - DNA, 20 bp, synthetic construct
  source 1..20: mol_type = other DNA
agtttgttccttcagagcag

SEQ ID NO: 860 - DNA, 20 bp, synthetic construct
  source 1..20: mol_type = other DNA
agccaatggtggcatacaca

SEQ ID NO: 861 - DNA, 20 bp, synthetic construct
  source 1..20: mol_type = other DNA
attgatcatccagctgtgac

SEQ ID NO: 862 - DNA, 20 bp, synthetic construct
  source 1..20: mol_type = other DNA
atgaaacatcattggcagcg

SEQ ID NO: 863 - DNA, 20 bp, synthetic construct
  source 1..20: mol_type = other DNA
gcctcttccagtcagccagc

SEQ ID NO: 864 - DNA, 20 bp, synthetic construct
  source 1..20: mol_type = other DNA
gtaccaaatgatggatgccc

SEQ ID NO: 865 - DNA, 20 bp, synthetic construct
  source 1..20: mol_type = other DNA
aaacacgacctaactgttca

SEQ ID NO: 866 - DNA, 20 bp, synthetic construct
  source 1..20: mol_type = other DNA
actgtaggcatggccgacag

SEQ ID NO: 867 - DNA, 20 bp, synthetic construct
  source 1..20: mol_type = other DNA
aacagaccactgggtgggca

SEQ ID NO: 868 - DNA, 20 bp, synthetic construct
  source 1..20: mol_type = other DNA
tgttgagcgcgaccctcagt

SEQ ID NO: 869 - DNA, 20 bp, synthetic construct
  source 1..20: mol_type = other DNA
tagtcggtgtcctccaacct

SEQ ID NO: 870 - DNA, 20 bp, synthetic construct
  source 1..20: mol_type = other DNA
aagagcacccgtaactgtaa

SEQ ID NO: 871 - DNA, 20 bp, synthetic construct
  source 1..20: mol_type = other DNA
gtagcaccatgtgagaccac

SEQ ID NO: 872 - DNA, 20 bp, synthetic construct
  source 1..20: mol_type = other DNA
tctcggagctctgatgtgtt

SEQ ID NO: 873 - DNA, 20 bp, synthetic construct
  source 1..20: mol_type = other DNA
ctctctccatctttaatggg

SEQ ID NO: 874 - DNA, 20 bp, synthetic construct
  source 1..20: mol_type = other DNA
gataagcctatgccaactac

SEQ ID NO: 875 - DNA, 20 bp, synthetic construct
  source 1..20: mol_type = other DNA
ttccctagacaaaactcctg

SEQ ID NO: 876 - DNA, 20 bp, synthetic construct
  source 1..20: mol_type = other DNA
acctcgcgctgagttccagg

SEQ ID NO: 877 - DNA, 20 bp, synthetic construct
  source 1..20: mol_type = other DNA
gtcaaggctttttacagctt

SEQ ID NO: 878 - DNA, 20 bp, synthetic construct
  source 1..20: mol_type = other DNA
aagcggaaattttcttcccg

SEQ ID NO: 879 - DNA, 20 bp, synthetic construct
  source 1..20: mol_type = other DNA
ggaaagaattgccagccatt

SEQ ID NO: 880 - DNA, 20 bp, synthetic construct
  source 1..20: mol_type = other DNA
acatcgaagttgacaaggta

SEQ ID NO: 881 - DNA, 20 bp, synthetic construct
  source 1..20: mol_type = other DNA
caatgttagccatgcccagg

SEQ ID NO: 882 - DNA, 20 bp, synthetic construct
  source 1..20: mol_type = other DNA
ccgagctattgctggccggc

SEQ ID NO: 883 - DNA, 20 bp, synthetic construct
  source 1..20: mol_type = other DNA
ctactatgttgtaacagctg

SEQ ID NO: 884 - DNA, 20 bp, synthetic construct
  source 1..20: mol_type = other DNA
cttgagggttactgagattc

SEQ ID NO: 885 - DNA, 20 bp, synthetic construct
  source 1..20: mol_type = other DNA
ttgggtagtgtttcaggcat

SEQ ID NO: 886 - DNA, 20 bp, synthetic construct
  source 1..20: mol_type = other DNA
ggatcatttcctgttatctg

SEQ ID NO: 887 - DNA, 20 bp, synthetic construct
  source 1..20: mol_type = other DNA
cgagttccgagcctcggagg

SEQ ID NO: 888 - DNA, 20 bp, synthetic construct
  source 1..20: mol_type = other DNA
tttcagtgctcatggtgtcc

SEQ ID NO: 889 - DNA, 20 bp, synthetic construct
  source 1..20: mol_type = other DNA
ccagactcggcaaagtcgag

SEQ ID NO: 890 - DNA, 20 bp, synthetic construct
  source 1..20: mol_type = other DNA
caggattatccatgtttctg

SEQ ID NO: 891 - DNA, 20 bp, synthetic construct
  source 1..20: mol_type = other DNA
tttgggttcgaattccatgt

SEQ ID NO: 892 - DNA, 20 bp, synthetic construct
  source 1..20: mol_type = other DNA
gatagacatccatgaacttc

SEQ ID NO: 893 - DNA, 20 bp, synthetic construct
  source 1..20: mol_type = other DNA
tcgttctgtatcagtctttc

SEQ ID NO: 894 - DNA, 20 bp, synthetic construct
  source 1..20: mol_type = other DNA
gacggaatgtgggctcgagt

SEQ ID NO: 895 - DNA, 20 bp, synthetic construct
  source 1..20: mol_type = other DNA
ggttttctcagaggtgaggc

SEQ ID NO: 896 - DNA, 20 bp, synthetic construct
  source 1..20: mol_type = other DNA
ggatgatgcagaaagcaata

SEQ ID NO: 897 - DNA, 20 bp, synthetic construct
  source 1..20: mol_type = other DNA
tgaaggatggcagcaaagta

SEQ ID NO: 898 - DNA, 20 bp, synthetic construct
  source 1..20: mol_type = other DNA
cttctcttctagcagttagt

SEQ ID NO: 899 - DNA, 20 bp, synthetic construct
  source 1..20: mol_type = other DNA
gctgcgcttaaggacatttc

SEQ ID NO: 900 - DNA, 20 bp, synthetic construct
  source 1..20: mol_type = other DNA
ttcctgttaattccactacg

SEQ ID NO: 901 - DNA, 20 bp, synthetic construct
  source 1..20: mol_type = other DNA
cattaagaggactcatcgtt

SEQ ID NO: 902 - DNA, 20 bp, synthetic construct
  source 1..20: mol_type = other DNA
tggattctctgtgatcttgt

SEQ ID NO: 903 - DNA, 20 bp, synthetic construct
  source 1..20: mol_type = other DNA
gtgtcattctgcagagcctg

SEQ ID NO: 904 - DNA, 20 bp, synthetic construct
  source 1..20: mol_type = other DNA
acgtggcatgtcacggactt

SEQ ID NO: 905 - DNA, 20 bp, synthetic construct
  source 1..20: mol_type = other DNA
cacttgtactccttgccatt

SEQ ID NO: 906 - DNA, 20 bp, synthetic construct
  source 1..20: mol_type = other DNA
gttgtgcagagcctcatgca

SEQ ID NO: 907 - DNA, 20 bp, synthetic construct
  source 1..20: mol_type = other DNA
ccaatgatatgacttcacca

SEQ ID NO: 908 - DNA, 20 bp, synthetic construct
  source 1..20: mol_type = other DNA
gtacgtatttggagttgaac

SEQ ID NO: 909 - DNA, 20 bp, synthetic construct
  source 1..20: mol_type = other DNA
atgttgttcctcacagaacc

SEQ ID NO: 910 - DNA, 20 bp, synthetic construct
  source 1..20: mol_type = other DNA
tgtgagatgggcttttcatc

SEQ ID NO: 911 - DNA, 20 bp, synthetic construct
  source 1..20: mol_type = other DNA
ggcgttggcgctaaggttga

SEQ ID NO: 912 - DNA, 20 bp, synthetic construct
  source 1..20: mol_type = other DNA
tattcggccgtgggtccctg

SEQ ID NO: 913 - DNA, 20 bp, synthetic construct
  source 1..20: mol_type = other DNA
cgaggacagcgggtgctctg

SEQ ID NO: 914 - DNA, 20 bp, synthetic construct
  source 1..20: mol_type = other DNA
aggcagacaaaagggttgag

SEQ ID NO: 915 - DNA, 20 bp, synthetic construct
  source 1..20: mol_type = other DNA
aagcaattgaggaatgtctc

SEQ ID NO: 916 - DNA, 20 bp, synthetic construct
  source 1..20: mol_type = other DNA
cactgcatcgattttgctcc

SEQ ID NO: 917 - DNA, 20 bp, synthetic construct
  source 1..20: mol_type = other DNA
gcgtcctcttttgaacatgg

SEQ ID NO: 918 - DNA, 20 bp, synthetic construct
  source 1..20: mol_type = other DNA
tctagcctagaaatgcatga

SEQ ID NO: 919 - DNA, 20 bp, synthetic construct
  source 1..20: mol_type = other DNA
acaggctcaagttccatctg

SEQ ID NO: 920 - DNA, 20 bp, synthetic construct
  source 1..20: mol_type = other DNA
atacatgtgtacatcaccct

SEQ ID NO: 921 - DNA, 20 bp, synthetic construct
  source 1..20: mol_type = other DNA
actaaccgacttggctgctt

SEQ ID NO: 922 - DNA, 20 bp, synthetic construct
  source 1..20: mol_type = other DNA
ccatgtggtactgaaccaag

SEQ ID NO: 923 - DNA, 20 bp, synthetic construct
  source 1..20: mol_type = other DNA
ggctgaagtcctgtgggcag

SEQ ID NO: 924 - DNA, 20 bp, synthetic construct
  source 1..20: mol_type = other DNA
aggaagagctgaagttctcc

SEQ ID NO: 925 - DNA, 20 bp, synthetic construct
  source 1..20: mol_type = other DNA
ccactcctgaaaactgaaaa

SEQ ID NO: 926 - DNA, 20 bp, synthetic construct
  source 1..20: mol_type = other DNA
aagaacttggccacaggtcc

SEQ ID NO: 927 - DNA, 20 bp, synthetic construct
  source 1..20: mol_type = other DNA
ttagcgggtagttcatggct

SEQ ID NO: 928 - DNA, 20 bp, synthetic construct
  source 1..20: mol_type = other DNA
ctaaggtgatgccacggagg

SEQ ID NO: 929 - DNA, 20 bp, synthetic construct
  source 1..20: mol_type = other DNA
ctggccaaacacccattcat

SEQ ID NO: 930 - DNA, 20 bp, synthetic construct
  source 1..20: mol_type = other DNA
ccttggtttcagcattcttg

SEQ ID NO: 931 - DNA, 20 bp, synthetic construct
  source 1..20: mol_type = other DNA
gggtgttgttttctcccatg

SEQ ID NO: 932 - DNA, 20 bp, synthetic construct
  source 1..20: mol_type = other DNA
tccttcagtccggttttatt

SEQ ID NO: 933 - DNA, 20 bp, synthetic construct
  source 1..20: mol_type = other DNA
acgacgttcatttcctctgc

SEQ ID NO: 934 - DNA, 20 bp, synthetic construct
  source 1..20: mol_type = other DNA
acgagttttttgtagcgtcg

SEQ ID NO: 935 - DNA, 20 bp, synthetic construct
  source 1..20: mol_type = other DNA
atttggcggtgaccgctgat

SEQ ID NO: 936 - DNA, 20 bp, synthetic construct
  source 1..20: mol_type = other DNA
cctttagcattcgtacaggc

SEQ ID NO: 937 - DNA, 20 bp, synthetic construct
  source 1..20: mol_type = other DNA
gacctccgatcactcctggc

SEQ ID NO: 938 - DNA, 20 bp, synthetic construct
  source 1..20: mol_type = other DNA
atggcaaacatctgcaatca

SEQ ID NO: 939 - DNA, 20 bp, synthetic construct
  source 1..20: mol_type = other DNA
gacagacttagactgatcac

SEQ ID NO: 940 - DNA, 20 bp, synthetic construct
  source 1..20: mol_type = other DNA
actatgagcgcgcatactgg

SEQ ID NO: 941 - DNA, 20 bp, synthetic construct
  source 1..20: mol_type = other DNA
gtcctagcgctctgtctgtt

SEQ ID NO: 942 - DNA, 20 bp, synthetic construct
  source 1..20: mol_type = other DNA
tacgcgcaattactacatgg

SEQ ID NO: 943 - DNA, 20 bp, synthetic construct
  source 1..20: mol_type = other DNA
atcttccttgccaacaacag

SEQ ID NO: 944 - DNA, 20 bp, synthetic construct
  source 1..20: mol_type = other DNA
tggcacctatccttgcacat

SEQ ID NO: 945 - DNA, 20 bp, synthetic construct
  source 1..20: mol_type = other DNA
gcatctgtttccgcttccag

SEQ ID NO: 946 - DNA, 20 bp, synthetic construct
  source 1..20: mol_type = other DNA
ctccctgcggaagcgcttgt

SEQ ID NO: 947 - DNA, 20 bp, synthetic construct
  source 1..20: mol_type = other DNA
ggatatacagctgtcttggg

SEQ ID NO: 948 - DNA, 20 bp, synthetic construct
  source 1..20: mol_type = other DNA
cctcaacttgctttaacaac

SEQ ID NO: 949 - DNA, 20 bp, synthetic construct
  source 1..20: mol_type = other DNA
ggtaggtagcaaagatgccg

SEQ ID NO: 950 - DNA, 20 bp, synthetic construct
  source 1..20: mol_type = other DNA
gtctttgtaaccctgagccg

SEQ ID NO: 951 - DNA, 20 bp, synthetic construct
  source 1..20: mol_type = other DNA
ggtctgatcctcgctgacct

SEQ ID NO: 952 - DNA, 20 bp, synthetic construct
  source 1..20: mol_type = other DNA
gatttcaggctctcaaactt

SEQ ID NO: 953 - DNA, 20 bp, synthetic construct
  source 1..20: mol_type = other DNA
gtagaggagcttgtagatgc

SEQ ID NO: 954 - DNA, 20 bp, synthetic construct
  source 1..20: mol_type = other DNA
tcacacattccagaagagga

SEQ ID NO: 955 - DNA, 20 bp, synthetic construct
  source 1..20: mol_type = other DNA
ctgttcttcagtggctgagc

SEQ ID NO: 956 - DNA, 20 bp, synthetic construct
  source 1..20: mol_type = other DNA
cattccagtgaaccagatgc

SEQ ID NO: 957 - DNA, 20 bp, synthetic construct
  source 1..20: mol_type = other DNA
tcatgtaggtggctttggtg

SEQ ID NO: 958 - DNA, 20 bp, synthetic construct
  source 1..20: mol_type = other DNA
cgaagaatgccaacacctca

SEQ ID NO: 959 - DNA, 20 bp, synthetic construct
  source 1..20: mol_type = other DNA
ggtccaaagttgcaaacaaa

SEQ ID NO: 960 - DNA, 20 bp, synthetic construct
  source 1..20: mol_type = other DNA
ctggtgcttgagttcgccgc

SEQ ID NO: 961 - DNA, 20 bp, synthetic construct
  source 1..20: mol_type = other DNA
aaaagccctcgcagttctcc

SEQ ID NO: 962 - DNA, 20 bp, synthetic construct
  source 1..20: mol_type = other DNA
tgagtacccagttctttggg

SEQ ID NO: 963 - DNA, 20 bp, synthetic construct
  source 1..20: mol_type = other DNA
ttattctcttctgggtgtcc

SEQ ID NO: 964 - DNA, 20 bp, synthetic construct
  source 1..20: mol_type = other DNA
acggttggcagcgcacatac

SEQ ID NO: 965 - DNA, 20 bp, synthetic construct
  source 1..20: mol_type = other DNA
cgctcctggctgaccaatca

SEQ ID NO: 966 - DNA, 20 bp, synthetic construct
  source 1..20: mol_type = other DNA
cacgatccagtgagttactt

SEQ ID NO: 967 - DNA, 20 bp, synthetic construct
  source 1..20: mol_type = other DNA
aggattatcgttggtgtcag

SEQ ID NO: 968 - DNA, 20 bp, synthetic construct
  source 1..20: mol_type = other DNA
gatgacacagcgtgagagaa

SEQ ID NO: 969 - DNA, 20 bp, synthetic construct
  source 1..20: mol_type = other DNA
gtagcgactgtagtgaaact

SEQ ID NO: 970 - DNA, 20 bp, synthetic construct
  source 1..20: mol_type = other DNA
aaattttaaaggctgcagcc

SEQ ID NO: 971 - DNA, 20 bp, synthetic construct
  source 1..20: mol_type = other DNA
tttgaagaaccaacggatgg

SEQ ID NO: 972 - DNA, 20 bp, synthetic construct
  source 1..20: mol_type = other DNA
agagaactccaagctaatcc

SEQ ID NO: 973 - DNA, 20 bp, synthetic construct
  source 1..20: mol_type = other DNA
tcgctcccgaaaggtaagac

SEQ ID NO: 974 - DNA, 20 bp, synthetic construct
  source 1..20: mol_type = other DNA
tgggtttattacctatgggt

SEQ ID NO: 975 - DNA, 20 bp, synthetic construct
  source 1..20: mol_type = other DNA
tggaagagggtcatcaacag

SEQ ID NO: 976 - DNA, 20 bp, synthetic construct
  source 1..20: mol_type = other DNA
tgatggctcttccaccgcct

SEQ ID NO: 977 - DNA, 20 bp, synthetic construct
  source 1..20: mol_type = other DNA
tgtgtgttcgattagctgca

SEQ ID NO: 978 - DNA, 20 bp, synthetic construct
  source 1..20: mol_type = other DNA
ttgtaccagacttggagaaa

SEQ ID NO: 979 - DNA, 20 bp, synthetic construct
  source 1..20: mol_type = other DNA
gtttttgtccactacaaagc

SEQ ID NO: 980 - DNA, 20 bp, synthetic construct
  source 1..20: mol_type = other DNA
acatagtcagcctttgtctt

SEQ ID NO: 981 - DNA, 20 bp, synthetic construct
  source 1..20: mol_type = other DNA
caggatttgcttgagggata

SEQ ID NO: 982 - DNA, 20 bp, synthetic construct
  source 1..20: mol_type = other DNA
ttcctggctcaaatgttggt

SEQ ID NO: 983 - DNA, 20 bp, synthetic construct
  source 1..20: mol_type = other DNA
agacaaacagaccacacctt

SEQ ID NO: 984 - DNA, 20 bp, synthetic construct
  source 1..20: mol_type = other DNA
caaagactttgcactggatc

SEQ ID NO: 985 - DNA, 20 bp, synthetic construct
  source 1..20: mol_type = other DNA
cgtagtccttgcggtcgtag

SEQ ID NO: 986 - DNA, 20 bp, synthetic construct
  source 1..20: mol_type = other DNA
ttgagatggatctgttgacc

SEQ ID NO: 987 - DNA, 20 bp, synthetic construct
  source 1..20: mol_type = other DNA
cagccaaaaagagacagaag

SEQ ID NO: 988 - DNA, 20 bp, synthetic construct
  source 1..20: mol_type = other DNA
ttgtatttcctggtcaacct

SEQ ID NO: 989 - DNA, 20 bp, synthetic construct
  source 1..20: mol_type = other DNA
gaggatatgctgcaggaagg

SEQ ID NO: 990 - DNA, 20 bp, synthetic construct
  source 1..20: mol_type = other DNA
ctgcctcaaggcggccttga

SEQ ID NO: 991 - DNA, 20 bp, synthetic construct
  source 1..20: mol_type = other DNA
atgcagggtacatggagaat

SEQ ID NO: 992 - DNA, 20 bp, synthetic construct
  source 1..20: mol_type = other DNA
gtcaactgtactgtgaggtt

SEQ ID NO: 993 - DNA, 20 bp, synthetic construct
  source 1..20: mol_type = other DNA
caacattgtgtctgaccagg

SEQ ID NO: 994 - DNA, 20 bp, synthetic construct
  source 1..20: mol_type = other DNA
tttccaggaaattctgagtg

SEQ ID NO: 995 - DNA, 20 bp, synthetic construct
  source 1..20: mol_type = other DNA
tgagcaactttgctctgtgg

SEQ ID NO: 996 - DNA, 20 bp, synthetic construct
  source 1..20: mol_type = other DNA
cgtaagtataggtcctcatt

SEQ ID NO: 997 - DNA, 20 bp, synthetic construct
  source 1..20: mol_type = other DNA
ggtgaagtcctaaagcttgc

SEQ ID NO: 998 - DNA, 20 bp, synthetic construct
  source 1..20: mol_type = other DNA
ggtcccaaaggctaggcatg

SEQ ID NO: 999 - DNA, 20 bp, synthetic construct
  source 1..20: mol_type = other DNA
gtgccggagcgtagaagccg

SEQ ID NO: 1000 - DNA, 20 bp, synthetic construct
  source 1..20: mol_type = other DNA
ggtttctatctaggaagctc

SEQ ID NO: 1001 - DNA, 20 bp, synthetic construct
  source 1..20: mol_type = other DNA
gcatatctttaagctggttg

SEQ ID NO: 1002 - DNA, 20 bp, synthetic construct
  source 1..20: mol_type = other DNA
caacaacgacttcttcaagt

SEQ ID NO: 1003 - DNA, 20 bp, synthetic construct
  source 1..20: mol_type = other DNA
gagctcatcagaagagctgg

SEQ ID NO: 1004 - DNA, 20 bp, synthetic construct
  source 1..20: mol_type = other DNA
gttctccaacagtctcagct

SEQ ID NO: 1005 - DNA, 20 bp, synthetic construct
  source 1..20: mol_type = other DNA
actgaagtacactggcattg

SEQ ID NO: 1006 - DNA, 20 bp, synthetic construct
  source 1..20: mol_type = other DNA
tcccacgcacacacatttgt

SEQ ID NO: 1007 - DNA, 20 bp, synthetic construct
  source 1..20: mol_type = other DNA
acacgctcacccatgctctc

SEQ ID NO: 1008 - DNA, 20 bp, synthetic construct
  source 1..20: mol_type = other DNA
ataacgaggcggcagagggc

SEQ ID NO: 1009 - DNA, 20 bp, synthetic construct
  source 1..20: mol_type = other DNA
gatcactttggacccagcgg

SEQ ID NO: 1010 - DNA, 20 bp, synthetic construct
  source 1..20: mol_type = other DNA
gactgctggaatgacatacc

SEQ ID NO: 1011 - DNA, 20 bp, synthetic construct
  source 1..20: mol_type = other DNA
agatgccaggtatgaacata

SEQ ID NO: 1012 - DNA, 20 bp, synthetic construct
  source 1..20: mol_type = other DNA
ccgcaggacagaattacttc

SEQ ID NO: 1013 - DNA, 20 bp, synthetic construct
  source 1..20: mol_type = other DNA
cgatctcgacagtcgctccg

SEQ ID NO: 1014 - DNA, 20 bp, synthetic construct
  source 1..20: mol_type = other DNA
ctgggttcggttcctcgact

SEQ ID NO: 1015 - DNA, 20 bp, synthetic construct
  source 1..20: mol_type = other DNA
ggccaaaactccaaaacaca

SEQ ID NO: 1016 - DNA, 20 bp, synthetic construct
  source 1..20: mol_type = other DNA
ccttccgaactgacggtttc

SEQ ID NO: 1017 - DNA, 20 bp, synthetic construct
  source 1..20: mol_type = other DNA
ccctcattccagcacacaag

SEQ ID NO: 1018 - DNA, 20 bp, synthetic construct
  source 1..20: mol_type = other DNA
cgagagaagatgttgtccga

SEQ ID NO: 1019 - DNA, 20 bp, synthetic construct
  source 1..20: mol_type = other DNA
ttgtcaagcggcagcagctt

SEQ ID NO: 1020 - DNA, 20 bp, synthetic construct
  source 1..20: mol_type = other DNA
gtccgcgggaagtagccacc

SEQ ID NO: 1021 - DNA, 20 bp, synthetic construct
  source 1..20: mol_type = other DNA
gttgaacctcagttcctttt

SEQ ID NO: 1022 - DNA, 20 bp, synthetic construct
  source 1..20: mol_type = other DNA
ggctgctgtaacgggccttg

SEQ ID NO: 1023 - DNA, 20 bp, synthetic construct
  source 1..20: mol_type = other DNA
tggtgtattttgttcagggc

SEQ ID NO: 1024 - DNA, 20 bp, synthetic construct
  source 1..20: mol_type = other DNA
gggatttctgttaacgcatt

SEQ ID NO: 1025 - DNA, 20 bp, synthetic construct
  source 1..20: mol_type = other DNA
tagcggctattgatctgaaa

SEQ ID NO: 1026 - DNA, 20 bp, synthetic construct
  source 1..20: mol_type = other DNA
tgtgaacttcgcccacaggc

SEQ ID NO: 1027 - DNA, 20 bp, synthetic construct
  source 1..20: mol_type = other DNA
cttgttttcctgatggttga

SEQ ID NO: 1028 - DNA, 20 bp, synthetic construct
  source 1..20: mol_type = other DNA
ttcttttgccctttattccg

SEQ ID NO: 1029 - DNA, 20 bp, synthetic construct
  source 1..20: mol_type = other DNA
tatccttcggcagccttctg

SEQ ID NO: 1030 - DNA, 20 bp, synthetic construct
  source 1..20: mol_type = other DNA
cccttcaaaacgacatccat

SEQ ID NO: 1031 - DNA, 20 bp, synthetic construct
  source 1..20: mol_type = other DNA
ctggaaagatgtccagctgc

SEQ ID NO: 1032 - DNA, 20 bp, synthetic construct
  source 1..20: mol_type = other DNA
aaccagaacacagaccagca

SEQ ID NO: 1033 - DNA, 20 bp, synthetic construct
  source 1..20: mol_type = other DNA
acgctggatcaccacacggt

SEQ ID NO: 1034 - DNA, 20 bp, synthetic construct
  source 1..20: mol_type = other DNA
gggaggagttggtacacacg

SEQ ID NO: 1035 - DNA, 20 bp, synthetic construct
  source 1..20: mol_type = other DNA
cacctgctcacggttcctgc

SEQ ID NO: 1036 - DNA, 20 bp, synthetic construct
  source 1..20: mol_type = other DNA
gtcgtagcagccacactggg

SEQ ID NO: 1037 - DNA, 20 bp, synthetic construct
  source 1..20: mol_type = other DNA
tcgctcacagtgacgacgga

SEQ ID NO: 1038 - DNA, 20 bp, synthetic construct
  source 1..20: mol_type = other DNA
gtaggtgttttgtttgtgct

SEQ ID NO: 1039 - DNA, 20 bp, synthetic construct
  source 1..20: mol_type = other DNA
taagttgaacagccattgcg

SEQ ID NO: 1040 - DNA, 20 bp, synthetic construct
  source 1..20: mol_type = other DNA
ggtaccagcatcacatctca

SEQ ID NO: 1041 - DNA, 20 bp, synthetic construct
  source 1..20: mol_type = other DNA
ccgctatgcgcagcgtttga

SEQ ID NO: 1042 - DNA, 20 bp, synthetic construct
  source 1..20: mol_type = other DNA
aaagtgcacgaggagaaggc

SEQ ID NO: 1043 - DNA, 20 bp, synthetic construct
  source 1..20: mol_type = other DNA
gatactgtacctgattagct

SEQ ID NO: 1044 - DNA, 20 bp, synthetic construct
  source 1..20: mol_type = other DNA
aggtagataacactacctct

SEQ ID NO: 1045 - DNA, 20 bp, synthetic construct
  source 1..20: mol_type = other DNA
ctggctttgaaagtgagtga

SEQ ID NO: 1046 - DNA, 20 bp, synthetic construct
  source 1..20: mol_type = other DNA
catcttccaagagggaacat

SEQ ID NO: 1047 - DNA, 20 bp, synthetic construct
  source 1..20: mol_type = other DNA
gtccaacgctgggttgatta

SEQ ID NO: 1048 - DNA, 20 bp, synthetic construct
  source 1..20: mol_type = other DNA
gctttggaatcatcagtggc

SEQ ID NO: 1049 - DNA, 20 bp, synthetic construct
  source 1..20: mol_type = other DNA
agagccacgatttctcggcg

SEQ ID NO: 1050 - DNA, 20 bp, synthetic construct
  source 1..20: mol_type = other DNA
tggatgaggactagtcattg

SEQ ID NO: 1051 - DNA, 20 bp, synthetic construct
  source 1..20: mol_type = other DNA
acggaattacagagaaagag

SEQ ID NO: 1052 - DNA, 20 bp, synthetic construct
  source 1..20: mol_type = other DNA
ccggcagattgagagtctgt

SEQ ID NO: 1053 - DNA, 20 bp, synthetic construct
  source 1..20: mol_type = other DNA
agggtgcttttgaggaacat

SEQ ID NO: 1054 - DNA, 20 bp, synthetic construct
  source 1..20: mol_type = other DNA
ggctgtgcgtgccacggtag

SEQ ID NO: 1055 - DNA, 20 bp, synthetic construct
  source 1..20: mol_type = other DNA
cccaaatggaattcccgatc

SEQ ID NO: 1056 - DNA, 20 bp, synthetic construct
  source 1..20: mol_type = other DNA
ccatctggagttcttcccga

SEQ ID NO: 1057 - DNA, 20 bp, synthetic construct
  source 1..20: mol_type = other DNA
catacacgaagagcttctgg

SEQ ID NO: 1058 - DNA, 20 bp, synthetic construct
  source 1..20: mol_type = other DNA
tggcataaactgtagtcact

SEQ ID NO: 1059 - DNA, 20 bp, synthetic construct
  source 1..20: mol_type = other DNA
ggcttctttaatgtgagacc

SEQ ID NO: 1060 - DNA, 20 bp, synthetic construct
  source 1..20: mol_type = other DNA
cttctacatggattctacca

SEQ ID NO: 1061 - DNA, 20 bp, synthetic construct
  source 1..20: mol_type = other DNA
actgctgctttggagttatt

SEQ ID NO: 1062 - DNA, 20 bp, synthetic construct
  source 1..20: mol_type = other DNA
acagcaagaagtcttttctc

SEQ ID NO: 1063 - DNA, 20 bp, synthetic construct
  source 1..20: mol_type = other DNA
tatctgccagtttccgactc

SEQ ID NO: 1064 - DNA, 20 bp, synthetic construct
  source 1..20: mol_type = other DNA
tccaacgcctctttggtctc

SEQ ID NO: 1065 - DNA, 20 bp, synthetic construct
  source 1..20: mol_type = other DNA
acttgatgatcagcttggcc

SEQ ID NO: 1066 - DNA, 20 bp, synthetic construct
  source 1..20: mol_type = other DNA
cagccaacttcatcctgacc

SEQ ID NO: 1067 - DNA, 20 bp, synthetic construct
  source 1..20: mol_type = other DNA
cccgccacatttagtctcgg

SEQ ID NO: 1068 - DNA, 20 bp, synthetic construct
  source 1..20: mol_type = other DNA
gcaatcttgcgggtggcaaa

SEQ ID NO: 1069 - DNA, 20 bp, synthetic construct
  source 1..20: mol_type = other DNA
ggcacatccttccatttctg

SEQ ID NO: 1070 - DNA, 20 bp, synthetic construct
  source 1..20: mol_type = other DNA
atgtactctgctatggtgct

SEQ ID NO: 1071 - DNA, 20 bp, synthetic construct
  source 1..20: mol_type = other DNA
ggagaataccttcatagcct

SEQ ID NO: 1072 - DNA, 20 bp, synthetic construct
  source 1..20: mol_type = other DNA
attgggctggctgttggcag

SEQ ID NO: 1073 - DNA, 20 bp, synthetic construct
  source 1..20: mol_type = other DNA
caacacggcagaatggtata

SEQ ID NO: 1074 - DNA, 20 bp, synthetic construct
  source 1..20: mol_type = other DNA
ccagaatatcgacgcaaaag

SEQ ID NO: 1075 - DNA, 20 bp, synthetic construct
  source 1..20: mol_type = other DNA
taggtatacacaggactgac

SEQ ID NO: 1076 - DNA, 20 bp, synthetic construct
  source 1..20: mol_type = other DNA
aggactgatcgtaggaccac

SEQ ID NO: 1077 - DNA, 20 bp, synthetic construct
  source 1..20: mol_type = other DNA
ggtgggtttgtgaagacagt

SEQ ID NO: 1078 - DNA, 20 bp, synthetic construct
  source 1..20: mol_type = other DNA
tagattcagacccaccttcc

SEQ ID NO: 1079 - DNA, 20 bp, synthetic construct
  source 1..20: mol_type = other DNA
gataggaaagcccagggtca

SEQ ID NO: 1080 - DNA, 20 bp, synthetic construct
  source 1..20: mol_type = other DNA
tgaagacccggcctcggaga

SEQ ID NO: 1081 - DNA, 20 bp, synthetic construct
  source 1..20: mol_type = other DNA
catagacacagaatccaaca

SEQ ID NO: 1082 - DNA, 20 bp, synthetic construct
  source 1..20: mol_type = other DNA
aagaaacaccaaaggtgcaa

SEQ ID NO: 1083 - DNA, 20 bp, synthetic construct
  source 1..20: mol_type = other DNA
aagaaggaagtcaggagcct

SEQ ID NO: 1084 - DNA, 20 bp, synthetic construct
  source 1..20: mol_type = other DNA
aagtctttgttggattcgag

SEQ ID NO: 1085 - DNA, 20 bp, synthetic construct
  source 1..20: mol_type = other DNA
gtggcgcccttcagcgtcag

SEQ ID NO: 1086 - DNA, 20 bp, synthetic construct
  source 1..20: mol_type = other DNA
gccgatcatgaactcgatgt

SEQ ID NO: 1087 - DNA, 20 bp, synthetic construct
  source 1..20: mol_type = other DNA
cccaggtgatagttcccgaa

SEQ ID NO: 1088 - DNA, 20 bp, synthetic construct
  source 1..20: mol_type = other DNA
cgggcatcaggaccaggaca

SEQ ID NO: 1089 - DNA, 20 bp, synthetic construct
  source 1..20: mol_type = other DNA
atgaaaacaacttctggagg

SEQ ID NO: 1090 - DNA, 20 bp, synthetic construct
  source 1..20: mol_type = other DNA
aactcatgctttttggcacc

SEQ ID NO: 1091 - DNA, 20 bp, synthetic construct
  source 1..20: mol_type = other DNA
ggcggacggccatgctgatc

SEQ ID NO: 1092 - DNA, 20 bp, synthetic construct
  source 1..20: mol_type = other DNA
tcgctgaagacttggaggat

SEQ ID NO: 1093 - DNA, 20 bp, synthetic construct
  source 1..20: mol_type = other DNA
cactgctggcttttcgagag

SEQ ID NO: 1094 - DNA, 20 bp, synthetic construct
  source 1..20: mol_type = other DNA
tgttttccagggtcctccga

SEQ ID NO: 1095 - DNA, 20 bp, synthetic construct
  source 1..20: mol_type = other DNA
gtagcaaataggcctttaca

SEQ ID NO: 1096 - DNA, 20 bp, synthetic construct
  source 1..20: mol_type = other DNA
tgctgctaagtccttacact

SEQ ID NO: 1097 - DNA, 20 bp, synthetic construct
  source 1..20: mol_type = other DNA
gcatttcttaggcgagccag

SEQ ID NO: 1098 - DNA, 20 bp, synthetic construct
  source 1..20: mol_type = other DNA
ccatccttgagttctctggg

SEQ ID NO: 1099 - DNA, 20 bp, synthetic construct
  source 1..20: mol_type = other DNA
cgttaagacatcaggctcca

SEQ ID NO: 1100 - DNA, 20 bp, synthetic construct
  source 1..20: mol_type = other DNA
ttagtgtttgtccggaacaa

SEQ ID NO: 1101 - DNA, 20 bp, synthetic construct
  source 1..20: mol_type = other DNA
caaacctcacattctgcagc

SEQ ID NO: 1102 - DNA, 20 bp, synthetic construct
  source 1..20: mol_type = other DNA
tggcaccactgatgttacag

SEQ ID NO: 1103 - DNA, 20 bp, synthetic construct
  source 1..20: mol_type = other DNA
acgaagaaatacctgaagct

SEQ ID NO: 1104 - DNA, 20 bp, synthetic construct
  source 1..20: mol_type = other DNA
tttgttgtccgcagcattaa

SEQ ID NO: 1105 - DNA, 20 bp, synthetic construct
  source 1..20: mol_type = other DNA
gggctcaagaaccctgaaag

SEQ ID NO: 1106 - DNA, 20 bp, synthetic construct
  source 1..20: mol_type = other DNA
tgagctcttggaatacggtt

SEQ ID NO: 1107 - DNA, 20 bp, synthetic construct
  source 1..20: mol_type = other DNA
cgacgtttacggtagacatt

SEQ ID NO: 1108 - DNA, 20 bp, synthetic construct
  source 1..20: mol_type = other DNA
ttatagcaccgcagcatccc

SEQ ID NO: 1109 - DNA, 20 bp, synthetic construct
  source 1..20: mol_type = other DNA
acttgcctgcagagatttct

SEQ ID NO: 1110 - DNA, 20 bp, synthetic construct
  source 1..20: mol_type = other DNA
gtatttcatttctgcaccca

SEQ ID NO: 1111 - DNA, 20 bp, synthetic construct
  source 1..20: mol_type = other DNA
gtcacagatcactcgtgccc

SEQ ID NO: 1112 - DNA, 20 bp, synthetic construct
  source 1..20: mol_type = other DNA
agatgcgttgtccgctgtgc

SEQ ID NO: 1113 - DNA, 20 bp, synthetic construct
  source 1..20: mol_type = other DNA
tgtggaaactcagcggataa

SEQ ID NO: 1114 - DNA, 20 bp, synthetic construct
  source 1..20: mol_type = other DNA
gtgcaaagaggacacttgta

SEQ ID NO: 1115 - DNA, 20 bp, synthetic construct
  source 1..20: mol_type = other DNA
tggattgtctgcatccataa

SEQ ID NO: 1116 - DNA, 20 bp, synthetic construct
  source 1..20: mol_type = other DNA
gagaacttctcatgcttgcc

SEQ ID NO: 1117 - DNA, 20 bp, synthetic construct
  source 1..20: mol_type = other DNA
aacttggtgtcctttttgac

SEQ ID NO: 1118 - DNA, 20 bp, synthetic construct
  source 1..20: mol_type = other DNA
gcccttggaacagacctgct

SEQ ID NO: 1119 - DNA, 20 bp, synthetic construct
  source 1..20: mol_type = other DNA
atttcaatgatggctgcttc

SEQ ID NO: 1120 - DNA, 20 bp, synthetic construct
  source 1..20: mol_type = other DNA
ttctcgaagtttccactcag

SEQ ID NO: 1121 - DNA, 20 bp, synthetic construct
  source 1..20: mol_type = other DNA
cacctttcaactccaggtcc

SEQ ID NO: 1122 - DNA, 20 bp, synthetic construct
  source 1..20: mol_type = other DNA
cttcattcacaccaaagtcc

SEQ ID NO: 1123 - DNA, 20 bp, synthetic construct
  source 1..20: mol_type = other DNA
cactgaaaggctagaagagg

SEQ ID NO: 1124 - DNA, 20 bp, synthetic construct
  source 1..20: mol_type = other DNA
gaccacgtgctgttgctttc

SEQ ID NO: 1125 - DNA, 20 bp, synthetic construct
  source 1..20: mol_type = other DNA
ccgtcttgacggttctgaat

SEQ ID NO: 1126 - DNA, 20 bp, synthetic construct
  source 1..20: mol_type = other DNA
ttgtcctcttggaatctctg

SEQ ID NO: 1127 - DNA, 20 bp, synthetic construct
  source 1..20: mol_type = other DNA
attctagcaggcaggcctcc

SEQ ID NO: 1128 - DNA, 20 bp, synthetic construct
  source 1..20: mol_type = other DNA
gcgccacgactgcagggtct

SEQ ID NO: 1129 - DNA, 20 bp, synthetic construct
  source 1..20: mol_type = other DNA
gcagcaaatcttcatcgctg

SEQ ID NO: 1130 - DNA, 20 bp, synthetic construct
  source 1..20: mol_type = other DNA
gagttgaggtttacagaaag

SEQ ID NO: 1131 - DNA, 20 bp, synthetic construct
  source 1..20: mol_type = other DNA
cccaagcttcagccttatca

SEQ ID NO: 1132 - DNA, 20 bp, synthetic construct
  source 1..20: mol_type = other DNA
gcgaagccacattctcaatc

SEQ ID NO: 1133 - DNA, 20 bp, synthetic construct
  source 1..20: mol_type = other DNA
tgttcaggatctcctcattc

SEQ ID NO: 1134 - DNA, 20 bp, synthetic construct
  source 1..20: mol_type = other DNA
atctccgttaacgaaattgc

SEQ ID NO: 1135 - DNA, 20 bp, synthetic construct
  source 1..20: mol_type = other DNA
ccgaacataggagtggtcag

SEQ ID NO: 1136 - DNA, 20 bp, synthetic construct
  source 1..20: mol_type = other DNA
gggtctaagtttggtctccc

SEQ ID NO: 1137 - DNA, 20 bp, synthetic construct
  source 1..20: mol_type = other DNA
caaaggagatcatgtgacat

SEQ ID NO: 1138 - DNA, 20 bp, synthetic construct
  source 1..20: mol_type = other DNA
gtgagagggaagcagtggca

SEQ ID NO: 1139 - DNA, 20 bp, synthetic construct
  source 1..20: mol_type = other DNA
gaacatcgtatttgtctgag

SEQ ID NO: 1140 - DNA, 20 bp, synthetic construct
  source 1..20: mol_type = other DNA
gttgctacagaggatgggaa

SEQ ID NO: 1141 - DNA, 20 bp, synthetic construct
  source 1..20: mol_type = other DNA
cacccggctcatctccgcca

SEQ ID NO: 1142 - DNA, 20 bp, synthetic construct
  source 1..20: mol_type = other DNA
cctgttctgatccagggaga

SEQ ID NO: 1143 - DNA, 20 bp, synthetic construct
  source 1..20: mol_type = other DNA
ttctccagcatcttccttac

SEQ ID NO: 1144 - DNA, 20 bp, synthetic construct
  source 1..20: mol_type = other DNA
ttgtgctgatgtgtggagac

SEQ ID NO: 1145 - DNA, 20 bp, synthetic construct
  source 1..20: mol_type = other DNA
ggcagtttacattatggcta

SEQ ID NO: 1146 - DNA, 20 bp, synthetic construct
  source 1..20: mol_type = other DNA
gaaagcccgaagcgaagcga

SEQ ID NO: 1147 - DNA, 20 bp, synthetic construct
  source 1..20: mol_type = other DNA
acttattagtatcggcgacg

SEQ ID NO: 1148 - DNA, 20 bp, synthetic construct
  source 1..20: mol_type = other DNA
cgatgtggtctgtcttgtcg

SEQ ID NO: 1149 - DNA, 20 bp, synthetic construct
  source 1..20: mol_type = other DNA
attcacagttggtgcatgat

SEQ ID NO: 1150 - DNA, 20 bp, synthetic construct
  source 1..20: mol_type = other DNA
agatgctgtccctaccgtcc

SEQ ID NO: 1151 - DNA, 20 bp, synthetic construct
  source 1..20: mol_type = other DNA
agctcggtcaataaactgtc

SEQ ID NO: 1152 - DNA, 20 bp, synthetic construct
  source 1..20: mol_type = other DNA
ccgctggaaatgttgtcctc

SEQ ID NO: 1153 - DNA, 20 bp, synthetic construct
  source 1..20: mol_type = other DNA
aaagccagatgctgaagacc

SEQ ID NO: 1154 - DNA, 20 bp, synthetic construct
  source 1..20: mol_type = other DNA
aggatgctccacaatccgcg

SEQ ID NO: 1155 - DNA, 20 bp, synthetic construct
  source 1..20: mol_type = other DNA
tgccagcgtttggttggctg

SEQ ID NO: 1156 - DNA, 20 bp, synthetic construct
  source 1..20: mol_type = other DNA
catcccttcttctaaggctt

SEQ ID NO: 1157 - DNA, 20 bp, synthetic construct
  source 1..20: mol_type = other DNA
ttctacgtctagtctctgct

SEQ ID NO: 1158 - DNA, 20 bp, synthetic construct
  source 1..20: mol_type = other DNA
gtaggtgttctgagcagatt

SEQ ID NO: 1159 - DNA, 20 bp, synthetic construct
  source 1..20: mol_type = other DNA
tacacagtgaaaggctggta

SEQ ID NO: 1160 - DNA, 20 bp, synthetic construct
  source 1..20: mol_type = other DNA
atttccttccactcggataa

SEQ ID NO: 1161 - DNA, 20 bp, synthetic construct
  source 1..20: mol_type = other DNA
ggacagcatcaaatcatcca

SEQ ID NO: 1162 - DNA, 20 bp, synthetic construct
  source 1..20: mol_type = other DNA
aagacaaagatggcaagaca

SEQ ID NO: 1163 - DNA, 20 bp, synthetic construct
  source 1..20: mol_type = other DNA
aggttgacaggtgggaagag

SEQ ID NO: 1164 - DNA, 20 bp, synthetic construct
  source 1..20: mol_type = other DNA
ggctaggaatgatttggaaa

SEQ ID NO: 1165 - DNA, 20 bp, synthetic construct
  source 1..20: mol_type = other DNA
cctgaaatcttgacctcagt

SEQ ID NO: 1166 - DNA, 20 bp, synthetic construct
  source 1..20: mol_type = other DNA
gctcaaacacagcattaaga

SEQ ID NO: 1167 - DNA, 20 bp, synthetic construct
  source 1..20: mol_type = other DNA
tcagattgcagtgggaagaa

SEQ ID NO: 1168 - DNA, 20 bp, synthetic construct
  source 1..20: mol_type = other DNA
attattcaccgtggcagtca

SEQ ID NO: 1169 - DNA, 20 bp, synthetic construct
  source 1..20: mol_type = other DNA
atccaagtaaccaccttggg

SEQ ID NO: 1170 - DNA, 20 bp, synthetic construct
  source 1..20: mol_type = other DNA
tggtcaggctgtaggcacct

SEQ ID NO: 1171 - DNA, 20 bp, synthetic construct
  source 1..20: mol_type = other DNA
ctacctggctgtctgtcgat

SEQ ID NO: 1172 - DNA, 20 bp, synthetic construct
  source 1..20: mol_type = other DNA
ctcattaggtcaaggctgac

SEQ ID NO: 1173 - DNA, 20 bp, synthetic construct
  source 1..20: mol_type = other DNA
cctgtgagttgtcccggatg

SEQ ID NO: 1174 - DNA, 20 bp, synthetic construct
  source 1..20: mol_type = other DNA
tcatagcgtaccttctgtgc

SEQ ID NO: 1175 - DNA, 20 bp, synthetic construct
  source 1..20: mol_type = other DNA
gcagccgttttgcaaattgt

SEQ ID NO: 1176 - DNA, 20 bp, synthetic construct
  source 1..20: mol_type = other DNA
cccatagggtcagattgctc

SEQ ID NO: 1177 - DNA, 20 bp, synthetic construct
  source 1..20: mol_type = other DNA
tgtctatgagtttcaggctg

SEQ ID NO: 1178 - DNA, 20 bp, synthetic construct
  source 1..20: mol_type = other DNA
ttcaattctgcgctccaggt

SEQ ID NO: 1179 - DNA, 20 bp, synthetic construct
  source 1..20: mol_type = other DNA
gttcgtggacagtgtattta

SEQ ID NO: 1180 - DNA, 20 bp, synthetic construct
  source 1..20: mol_type = other DNA
ttgcaggtcgctgcaaaagt

SEQ ID NO: 1181 - DNA, 20 bp, synthetic construct
  source 1..20: mol_type = other DNA
cattgtctgtcagaaccttc

SEQ ID NO: 1182 - DNA, 20 bp, synthetic construct
  source 1..20: mol_type = other DNA
ttttatacactgggttgccc

SEQ ID NO: 1183 - DNA, 20 bp, synthetic construct
  source 1..20: mol_type = other DNA
gtctccacgtaagattacct

SEQ ID NO: 1184 - DNA, 20 bp, synthetic construct
  source 1..20: mol_type = other DNA
aattggacgaggaagctcat

SEQ ID NO: 1185 - DNA, 20 bp, synthetic construct
  source 1..20: mol_type = other DNA
tgagatggtagccacggcca

SEQ ID NO: 1186 - DNA, 20 bp, synthetic construct
  source 1..20: mol_type = other DNA
gggcactcgaaggccaggca

SEQ ID NO: 1187 - DNA, 20 bp, synthetic construct
  source 1..20: mol_type = other DNA
cccatttccacttgcacatt

SEQ ID NO: 1188 - DNA, 20 bp, synthetic construct
  source 1..20: mol_type = other DNA
ggtagccgggcttacagtca

SEQ ID NO: 1189 - DNA, 20 bp, synthetic construct
  source 1..20: mol_type = other DNA
acgtactacctggccaaagc

SEQ ID NO: 1190 - DNA, 20 bp, synthetic construct
  source 1..20: mol_type = other DNA
aataaggctcagagccgtct

SEQ ID NO: 1191 - DNA, 20 bp, synthetic construct
  source 1..20: mol_type = other DNA
ggctcaaactcagttgtcac

SEQ ID NO: 1192 - DNA, 20 bp, synthetic construct
  source 1..20: mol_type = other DNA
gcttaggagctgttgtccac

SEQ ID NO: 1193 - DNA, 20 bp, synthetic construct
  source 1..20: mol_type = other DNA
agctctcgagcactccgggc

SEQ ID NO: 1194 - DNA, 20 bp, synthetic construct
  source 1..20: mol_type = other DNA
ggtgaggctatcgctttcct

SEQ ID NO: 1195 - DNA, 20 bp, synthetic construct
  source 1..20: mol_type = other DNA
ttccggagttgtttacactc

SEQ ID NO: 1196 - DNA, 20 bp, synthetic construct
  source 1..20: mol_type = other DNA
gaggatatttcgtgccgcca

SEQ ID NO: 1197 - DNA, 20 bp, synthetic construct
  source 1..20: mol_type = other DNA
tgaaaacgtgggtctctgac

SEQ ID NO: 1198 - DNA, 20 bp, synthetic construct
  source 1..20: mol_type = other DNA
gcggtgcgcctgtttccgct

SEQ ID NO: 1199 - DNA, 20 bp, synthetic construct
  source 1..20: mol_type = other DNA
gtaagtgcctgagaggacag

SEQ ID NO: 1200 - DNA, 20 bp, synthetic construct
  source 1..20: mol_type = other DNA
aagtgaggaagttgcctgtg

SEQ ID NO: 1201 - DNA, 20 bp, synthetic construct
  source 1..20: mol_type = other DNA
ggttctctcttgtacagggc

SEQ ID NO: 1202 - DNA, 20 bp, synthetic construct
  source 1..20: mol_type = other DNA
tccctagaacagaagatcac

SEQ ID NO: 1203 - DNA, 20 bp, synthetic construct
  source 1..20: mol_type = other DNA
gtcgttggcgcactcgtcta

SEQ ID NO: 1204 - DNA, 20 bp, synthetic construct
  source 1..20: mol_type = other DNA
gatgaaggtcaggtttacca

SEQ ID NO: 1205 - DNA, 20 bp, synthetic construct
  source 1..20: mol_type = other DNA
gggatgacacattgaaagaa

SEQ ID NO: 1206 - DNA, 20 bp, synthetic construct
  source 1..20: mol_type = other DNA
ctagtccggatggagagttc

SEQ ID NO: 1207 - DNA, 20 bp, synthetic construct
  source 1..20: mol_type = other DNA
cttggactcttctgggtttt

SEQ ID NO: 1208 - DNA, 20 bp, synthetic construct
  source 1..20: mol_type = other DNA
gggtccaagctattttgctt

SEQ ID NO: 1209 - DNA, 20 bp, synthetic construct
  source 1..20: mol_type = other DNA
agctctcatttccaaggaga

SEQ ID NO: 1210 - DNA, 20 bp, synthetic construct
  source 1..20: mol_type = other DNA
cataggaccgtatttcggcg

SEQ ID NO: 1211 - DNA, 20 bp, synthetic construct
  source 1..20: mol_type = other DNA
ttggcaaatctggcgtgtaa

SEQ ID NO: 1212 - DNA, 20 bp, synthetic construct
  source 1..20: mol_type = other DNA
tctggcctatatgaatccat

SEQ ID NO: 1213 - DNA, 20 bp, synthetic construct
  source 1..20: mol_type = other DNA
tggttggtgtgtatcaaact

SEQ ID NO: 1214 - DNA, 20 bp, synthetic construct
  source 1..20: mol_type = other DNA
ccagtaaaaggatgtctgca

SEQ ID NO: 1215 - DNA, 20 bp, synthetic construct
  source 1..20: mol_type = other DNA
tcaaaccatactcgctcacc

SEQ ID NO: 1216 - DNA, 20 bp, synthetic construct
  source 1..20: mol_type = other DNA
cgtacaccacaccatctttg

SEQ ID NO: 1217 - DNA, 20 bp, synthetic construct
  source 1..20: mol_type = other DNA
tcccaaccgtgaccttcttg

SEQ ID NO: 1218 - DNA, 20 bp, synthetic construct
  source 1..20: mol_type = other DNA
gcgtctgcttattcttgtct

SEQ ID NO: 1219 - DNA, 20 bp, synthetic construct
  source 1..20: mol_type = other DNA
agtcgatatggaattcgctg

SEQ ID NO: 1220 - DNA, 20 bp, synthetic construct
  source 1..20: mol_type = other DNA
cgaactacatggtatttccc

SEQ ID NO: 1221 - DNA, 20 bp, synthetic construct
  source 1..20: mol_type = other DNA
tccaggtccgtgaacactgc

SEQ ID NO: 1222 - DNA, 20 bp, synthetic construct
  source 1..20: mol_type = other DNA
caggagtgagaagttgctac

SEQ ID NO: 1223 - DNA, 20 bp, synthetic construct
  source 1..20: mol_type = other DNA
agcaagtgtacaaccctgtg

SEQ ID NO: 1224 - DNA, 20 bp, synthetic construct
  source 1..20: mol_type = other DNA
cctttcttctcgtgcagtgt

SEQ ID NO: 1225 - DNA, 20 bp, synthetic construct
  source 1..20: mol_type = other DNA
ggccatgtagttggaggact

SEQ ID NO: 1226 - DNA, 20 bp, synthetic construct
  source 1..20: mol_type = other DNA
agaaattggcaagccgtaac

SEQ ID NO: 1227 - DNA, 20 bp, synthetic construct
  source 1..20: mol_type = other DNA
gaacagcatctggtgctgag

SEQ ID NO: 1228 - DNA, 20 bp, synthetic construct
  source 1..20: mol_type = other DNA
ggagttaaagtgatgtggaa

SEQ ID NO: 1229 - DNA, 20 bp, synthetic construct
  source 1..20: mol_type = other DNA
tgagtagaccgagccgaagc

SEQ ID NO: 1230 - DNA, 20 bp, synthetic construct
  source 1..20: mol_type = other DNA
ccgcgattgaggtcgataag

SEQ ID NO: 1231 - DNA, 20 bp, synthetic construct
  source 1..20: mol_type = other DNA
tatgtgccacaccacccagg

SEQ ID NO: 1232 - DNA, 20 bp, synthetic construct
  source 1..20: mol_type = other DNA
caaatggaaatgtggctgtg

SEQ ID NO: 1233 - DNA, 20 bp, synthetic construct
  source 1..20: mol_type = other DNA
gtgaatcgcaccgtttctcc

SEQ ID NO: 1234 - DNA, 20 bp, synthetic construct
  source 1..20: mol_type = other DNA
taactcttgtggcacaagtt

SEQ ID NO: 1235 - DNA, 20 bp, synthetic construct
  source 1..20: mol_type = other DNA
gcgcttccagagttaaaagc

SEQ ID NO: 1236 - DNA, 20 bp, synthetic construct
  source 1..20: mol_type = other DNA
ccttgggtttcgatgcttgg

SEQ ID NO: 1237 - DNA, 20 bp, synthetic construct
  source 1..20: mol_type = other DNA
gagtacagtccactggagtc

SEQ ID NO: 1238 - DNA, 20 bp, synthetic construct
  source 1..20: mol_type = other DNA
gactccaaggattccattca

SEQ ID NO: 1239 - DNA, 20 bp, synthetic construct
  source 1..20: mol_type = other DNA
tccgataggcgtgctgtgat

SEQ ID NO: 1240 - DNA, 20 bp, synthetic construct
  source 1..20: mol_type = other DNA
gagctgcgtgtccttccaag

SEQ ID NO: 1241 - DNA, 20 bp, synthetic construct
  source 1..20: mol_type = other DNA
acatgaggccatttaggtcc

SEQ ID NO: 1242 - DNA, 20 bp, synthetic construct
  source 1..20: mol_type = other DNA
cagaggagaaatggtgctaa

SEQ ID NO: 1243 - DNA, 20 bp, synthetic construct
  source 1..20: mol_type = other DNA
ttgcacacagtgccaaacac

SEQ ID NO: 1244 - DNA, 20 bp, synthetic construct
  source 1..20: mol_type = other DNA
cacttgctctttggtcttct

SEQ ID NO: 1245 - DNA, 20 bp, synthetic construct
  source 1..20: mol_type = other DNA
gtagtctctcttcaattagg

SEQ ID NO: 1246 - DNA, 20 bp, synthetic construct
  source 1..20: mol_type = other DNA
ggtcaggattctagtgtctt

SEQ ID NO: 1247 - DNA, 20 bp, synthetic construct
  source 1..20: mol_type = other DNA
caaggtgtgcggtccagctc

SEQ ID NO: 1248 - DNA, 20 bp, synthetic construct
  source 1..20: mol_type = other DNA
tctttgacgaatgcttttcc

SEQ ID NO: 1249 - DNA, 20 bp, synthetic construct
  source 1..20: mol_type = other DNA
atcaggctaggcttatgcaa

SEQ ID NO: 1250 - DNA, 20 bp, synthetic construct
  source 1..20: mol_type = other DNA
ttgcattcttccagtgtctc

SEQ ID NO: 1251 - DNA, 20 bp, synthetic construct
  source 1..20: mol_type = other DNA
atcagctgtaccctgacttc

SEQ ID NO: 1252 - DNA, 20 bp, synthetic construct
  source 1..20: mol_type = other DNA
ttggttcgggagcggtatgt

SEQ ID NO: 1253 - DNA, 20 bp, synthetic construct
  source 1..20: mol_type = other DNA
cctatctgcagagcagtgct

SEQ ID NO: 1254 - DNA, 20 bp, synthetic construct
  source 1..20: mol_type = other DNA
tgtcattgaggcctatccac

SEQ ID NO: 1255 - DNA, 20 bp, synthetic construct
  source 1..20: mol_type = other DNA
ggttgaacacatccataaga

SEQ ID NO: 1256 - DNA, 20 bp, synthetic construct
  source 1..20: mol_type = other DNA
ctgaaaaactgcagaaaggc

SEQ ID NO: 1257 - DNA, 20 bp, synthetic construct
  source 1..20: mol_type = other DNA
tgacgtacgtcacgcagggc

SEQ ID NO: 1258 - DNA, 20 bp, synthetic construct
  source 1..20: mol_type = other DNA
aacgttgacttccatgttcc

SEQ ID NO: 1259 - DNA, 20 bp, synthetic construct
  source 1..20: mol_type = other DNA
gtcctgtctcggaagatctg

SEQ ID NO: 1260 - DNA, 20 bp, synthetic construct
  source 1..20: mol_type = other DNA
ttataaggcagttgagtgac

SEQ ID NO: 1261 - DNA, 20 bp, synthetic construct
  source 1..20: mol_type = other DNA
ctattgtgaggaatacaggg

SEQ ID NO: 1262 - DNA, 20 bp, synthetic construct
  source 1..20: mol_type = other DNA
atagtcagggtcaaagccaa

SEQ ID NO: 1263 - DNA, 20 bp, synthetic construct
  source 1..20: mol_type = other DNA
ctagggttccttcgtcctga

SEQ ID NO: 1264 - DNA, 20 bp, synthetic construct
  source 1..20: mol_type = other DNA
ctcatgccataggaaggacc

SEQ ID NO: 1265 - DNA, 20 bp, synthetic construct
  source 1..20: mol_type = other DNA
attggatgtttctgggttag

SEQ ID NO: 1266 - DNA, 20 bp, synthetic construct
  source 1..20: mol_type = other DNA
ccagacttgctgtccctctc

SEQ ID NO: 1267 - DNA, 20 bp, synthetic construct
  source 1..20: mol_type = other DNA
ggcacacacttggcggttct

SEQ ID NO: 1268 - DNA, 20 bp, synthetic construct
  source 1..20: mol_type = other DNA
catgttgtggatgtactggg

SEQ ID NO: 1269 - DNA, 20 bp, synthetic construct
  source 1..20: mol_type = other DNA
tcacctttgtctttgtccag

SEQ ID NO: 1270 - DNA, 20 bp, synthetic construct
  source 1..20: mol_type = other DNA
tgatctagccttgtccttcc

SEQ ID NO: 1271 - DNA, 20 bp, synthetic construct
  source 1..20: mol_type = other DNA
tgagcttgctcgctcgggag

SEQ ID NO: 1272 - DNA, 20 bp, synthetic construct
  source 1..20: mol_type = other DNA
ggaccctgttgcaacagagc

SEQ ID NO: 1273 - DNA, 20 bp, synthetic construct
  source 1..20: mol_type = other DNA
aataaaagagcaggagggaa

SEQ ID NO: 1274 - DNA, 20 bp, synthetic construct
  source 1..20: mol_type = other DNA
cagtccaggattgtcagaca

SEQ ID NO: 1275 - DNA, 20 bp, synthetic construct
  source 1..20: mol_type = other DNA
acgttgcgtaggcgcaagct

SEQ ID NO: 1276 - DNA, 20 bp, synthetic construct
  source 1..20: mol_type = other DNA
aaggatgactgacgggatga

SEQ ID NO: 1277 - DNA, 20 bp, synthetic construct
  source 1..20: mol_type = other DNA
acccacatgggaatggacat

SEQ ID NO: 1278 - DNA, 20 bp, synthetic construct
  source 1..20: mol_type = other DNA
ttccagcgtcttgagctgtg

SEQ ID NO: 1279 - DNA, 20 bp, synthetic construct
  source 1..20: mol_type = other DNA
ggcaagtgcttcttatgaga

SEQ ID NO: 1280 - DNA, 20 bp, synthetic construct
  source 1..20: mol_type = other DNA
caggaaaggcacatttatca

SEQ ID NO: 1281 - DNA, 20 bp, synthetic construct
  source 1..20: mol_type = other DNA
caccatagatgaagaggatt

SEQ ID NO: 1282 - DNA, 20 bp, synthetic construct
  source 1..20: mol_type = other DNA
cgtcgtaggtgtccttggtg

SEQ ID NO: 1283 - DNA, 20 bp, synthetic construct
  source 1..20: mol_type = other DNA
gtatggttttcctcaggatc

SEQ ID NO: 1284 - DNA, 20 bp, synthetic construct
  source 1..20: mol_type = other DNA
cactgagactctcagtcatg

SEQ ID NO: 1285 - DNA, 20 bp, synthetic construct
  source 1..20: mol_type = other DNA
aactgtgcaccagctgtttg

SEQ ID NO: 1286 - DNA, 20 bp, synthetic construct
  source 1..20: mol_type = other DNA
gcgaagggtttggaagagga

SEQ ID NO: 1287 - DNA, 20 bp, synthetic construct
  source 1..20: mol_type = other DNA
tatagcaagccaggactcca

SEQ ID NO: 1288 - DNA, 20 bp, synthetic construct
  source 1..20: mol_type = other DNA
acataggtaagcctagcctg

SEQ ID NO: 1289 - DNA, 20 bp, synthetic construct
  source 1..20: mol_type = other DNA
gggttggtttcctcttttga

SEQ ID NO: 1290 - DNA, 20 bp, synthetic construct
  source 1..20: mol_type = other DNA
atctacacatgacctgagag

SEQ ID NO: 1291 - DNA, 20 bp, synthetic construct
  source 1..20: mol_type = other DNA
accagtcaatctaaagccca

SEQ ID NO: 1292 - DNA, 20 bp, synthetic construct
  source 1..20: mol_type = other DNA
aacctgcctagcttgcttac

SEQ ID NO: 1293 - DNA, 20 bp, synthetic construct
  source 1..20: mol_type = other DNA
atttcacttctctgatgcct

SEQ ID NO: 1294 - DNA, 20 bp, synthetic construct
  source 1..20: mol_type = other DNA
aactctaaaaaccctggaca

SEQ ID NO: 1295 - DNA, 20 bp, synthetic construct
  source 1..20: mol_type = other DNA
atccattgagcatcacatgg

SEQ ID NO: 1296 - DNA, 20 bp, synthetic construct
  source 1..20: mol_type = other DNA
cgttgacacaaatggtgact

SEQ ID NO: 1297 - DNA, 20 bp, synthetic construct
  source 1..20: mol_type = other DNA
caacagagcttgtgtgtcgg

SEQ ID NO: 1298 - DNA, 20 bp, synthetic construct
  source 1..20: mol_type = other DNA
ggctgtactgagcatcatct

SEQ ID NO: 1299 - DNA, 20 bp, synthetic construct
  source 1..20: mol_type = other DNA
catcttctggtttgcttcct

SEQ ID NO: 1300 - DNA, 20 bp, synthetic construct
  source 1..20: mol_type = other DNA
catgggactgttactttact

SEQ ID NO: 1301 - DNA, 20 bp, synthetic construct
  source 1..20: mol_type = other DNA
attctctcgaatctaccggg

SEQ ID NO: 1302 - DNA, 20 bp, synthetic construct
  source 1..20: mol_type = other DNA
ataactgaatgtgagctgag

SEQ ID NO: 1303 - DNA, 20 bp, synthetic construct
  source 1..20: mol_type = other DNA
gggtagatgtcttcaggatt

SEQ ID NO: 1304 - DNA, 20 bp, synthetic construct
  source 1..20: mol_type = other DNA
aagagggatgccaagatgat

SEQ ID NO: 1305 - DNA, 20 bp, synthetic construct
  source 1..20: mol_type = other DNA
gaaatcagaagagggccatg

SEQ ID NO: 1306 - DNA, 20 bp, synthetic construct
  source 1..20: mol_type = other DNA
taggtgacaaccagttactt

SEQ ID NO: 1307 - DNA, 20 bp, synthetic construct
  source 1..20: mol_type = other DNA
ggcgtatctgtgtgaggact

SEQ ID NO: 1308 - DNA, 20 bp, synthetic construct
  source 1..20: mol_type = other DNA
gcaactttcctgttttcgct

SEQ ID NO: 1309 - DNA, 20 bp, synthetic construct
  source 1..20: mol_type = other DNA
atgccgtaagaagcacttga

SEQ ID NO: 1310 - DNA, 20 bp, synthetic construct
  source 1..20: mol_type = other DNA
tccgacacatcaaaggtgat

SEQ ID NO: 1311 - DNA, 20 bp, synthetic construct
  source 1..20: mol_type = other DNA
ttaaggtgtctcaggttctc

SEQ ID NO: 1312 - DNA, 20 bp, synthetic construct
  source 1..20: mol_type = other DNA
ccctagaggcagcgattaag

SEQ ID NO: 1313 - DNA, 20 bp, synthetic construct
  source 1..20: mol_type = other DNA
acagcatagagctcagtttc

SEQ ID NO: 1314 - DNA, 20 bp, synthetic construct
  source 1..20: mol_type = other DNA
ccgcttgaaagcgtcttttt

SEQ ID NO: 1315 - DNA, 20 bp, synthetic construct
  source 1..20: mol_type = other DNA
aatccaaggaatgtggtctg

SEQ ID NO: 1316 - DNA, 20 bp, synthetic construct
  source 1..20: mol_type = other DNA
gatacattgatacaagccct

SEQ ID NO: 1317 - DNA, 20 bp, synthetic construct
  source 1..20: mol_type = other DNA
cgcatttggaggatgtgatg

SEQ ID NO: 1318 - DNA, 20 bp, synthetic construct
  source 1..20: mol_type = other DNA
tctgcgggtagctctggcct

SEQ ID NO: 1319 - DNA, 20 bp, synthetic construct
  source 1..20: mol_type = other DNA
ccaagaatactgtgagggtg

SEQ ID NO: 1320 - DNA, 20 bp, synthetic construct
  source 1..20: mol_type = other DNA
gaagggaattgcttttcacg

SEQ ID NO: 1321 - DNA, 20 bp, synthetic construct
  source 1..20: mol_type = other DNA
tttggacaaggactgctgtt

SEQ ID NO: 1322 - DNA, 20 bp, synthetic construct
  source 1..20: mol_type = other DNA
aacttgctgttcaccaggat

SEQ ID NO: 1323 - DNA, 20 bp, synthetic construct
  source 1..20: mol_type = other DNA
gacacagtcaaagatgctct

SEQ ID NO: 1324 - DNA, 20 bp, synthetic construct
  source 1..20: mol_type = other DNA
tgacctcatccagtttccaa

SEQ ID NO: 1325 - DNA, 20 bp, synthetic construct
  source 1..20: mol_type = other DNA
aggaactggtgtaaaagccc

SEQ ID NO: 1326 - DNA, 20 bp, synthetic construct
  source 1..20: mol_type = other DNA
ttttcagttgagcaatccac

SEQ ID NO: 1327 - DNA, 20 bp, synthetic construct
  source 1..20: mol_type = other DNA
gagtccttgaattagtgggc

SEQ ID NO: 1328 - DNA, 20 bp, synthetic construct
  source 1..20: mol_type = other DNA
atgcctggttctgttgatag

SEQ ID NO: 1329 - DNA, 20 bp, synthetic construct
  source 1..20: mol_type = other DNA
cattgggcccactcccaccc

SEQ ID NO: 1330 - DNA, 20 bp, synthetic construct
  source 1..20: mol_type = other DNA
aatttgagccacagaggccg

SEQ ID NO: 1331 - DNA, 20 bp, synthetic construct
  source 1..20: mol_type = other DNA
ttccggaaggaaagcgccgt

SEQ ID NO: 1332 - DNA, 20 bp, synthetic construct
  source 1..20: mol_type = other DNA
cgtccgtagaaaggtagttg

SEQ ID NO: 1333 - DNA, 20 bp, synthetic construct
  source 1..20: mol_type = other DNA
ccgtgctgtagacgacaggc

SEQ ID NO: 1334 - DNA, 20 bp, synthetic construct
  source 1..20: mol_type = other DNA
cgataatctagcaacagacg

SEQ ID NO: 1335 - DNA, 20 bp, synthetic construct
  source 1..20: mol_type = other DNA
ggcagatatgaaaggcatgg

SEQ ID NO: 1336 - DNA, 20 bp, synthetic construct
  source 1..20: mol_type = other DNA
tcgtgtaatcttggtggatg

SEQ ID NO: 1337 - DNA, 20 bp, synthetic construct
  source 1..20: mol_type = other DNA
tatattcggttcccggttcc

SEQ ID NO: 1338 - DNA, 20 bp, synthetic construct
  source 1..20: mol_type = other DNA
gggaacttgaaggcagccac

SEQ ID NO: 1339 - DNA, 20 bp, synthetic construct
  source 1..20: mol_type = other DNA
ggtcgcatgttgtggaactt

SEQ ID NO: 1340 - DNA, 20 bp, synthetic construct
  source 1..20: mol_type = other DNA
cttgaccgtcgatgttaaaa

SEQ ID NO: 1341 - DNA, 20 bp, synthetic construct
  source 1..20: mol_type = other DNA
tcgctctgtctcgctctccc

SEQ ID NO: 1342 - DNA, 20 bp, synthetic construct
  source 1..20: mol_type = other DNA
tcgcgccatcgtgacctccc

SEQ ID NO: 1343 - DNA, 20 bp, synthetic construct
  source 1..20: mol_type = other DNA
ggcccgaggaaacgcagatc

SEQ ID NO: 1344 - DNA, 20 bp, synthetic construct
  source 1..20: mol_type = other DNA
ggcatctccgattctccagt

SEQ ID NO: 1345 - DNA, 20 bp, synthetic construct
  source 1..20: mol_type = other DNA
tcataaagttcacacctgca

SEQ ID NO: 1346 - DNA, 20 bp, synthetic construct
  source 1..20: mol_type = other DNA
tattcattccaatcacaggg

SEQ ID NO: 1347 - DNA, 20 bp, synthetic construct
  source 1..20: mol_type = other DNA
ggttcctggtttcacatcgt

SEQ ID NO: 1348 - DNA, 20 bp, synthetic construct
  source 1..20: mol_type = other DNA
agttagtagcgtttcatggt

SEQ ID NO: 1349 - DNA, 20 bp, synthetic construct
  source 1..20: mol_type = other DNA
acgttcacactggcagtcct

SEQ ID NO: 1350 - DNA, 20 bp, synthetic construct
  source 1..20: mol_type = other DNA
gcaagatcatgcctatagtt

SEQ ID NO: 1351 - DNA, 20 bp, synthetic construct
  source 1..20: mol_type = other DNA
tgatgtccgccatactggat

SEQ ID NO: 1352 - DNA, 20 bp, synthetic construct
  source 1..20: mol_type = other DNA
atctagagtcccgtaactca

SEQ ID NO: 1353 - DNA, 20 bp, synthetic construct
  source 1..20: mol_type = other DNA
aaaggttgtgagggttgctg

SEQ ID NO: 1354 - DNA, 20 bp, synthetic construct
  source 1..20: mol_type = other DNA
ttgatgatgaagatggtccc

SEQ ID NO: 1355 - DNA, 20 bp, synthetic construct
  source 1..20: mol_type = other DNA
tgggctctctcagttccaca

SEQ ID NO: 1356 - DNA, 20 bp, synthetic construct
  source 1..20: mol_type = other DNA
gggaagatgatcattcttag

SEQ ID NO: 1357 - DNA, 20 bp, synthetic construct
  source 1..20: mol_type = other DNA
agggaaggcgagaccgggag

SEQ ID NO: 1358 - DNA, 20 bp, synthetic construct
  source 1..20: mol_type = other DNA
ttctccaagcaagaagctat

SEQ ID NO: 1359 - DNA, 20 bp, synthetic construct
  source 1..20: mol_type = other DNA
ttaaagcactggctcagatt

SEQ ID NO: 1360 - DNA, 20 bp, synthetic construct
  source 1..20: mol_type = other DNA
tatttggaagcaccaggcat

SEQ ID NO: 1361 - DNA, 20 bp, synthetic construct
  source 1..20: mol_type = other DNA
gtactcgccttggcgccact

SEQ ID NO: 1362 - DNA, 20 bp, synthetic construct
  source 1..20: mol_type = other DNA
tggtcaccttgtaggtcgtg

SEQ ID NO: 1363 - DNA, 20 bp, synthetic construct
  source 1..20: mol_type = other DNA
tatacacagcaaagcagtgt

SEQ ID NO: 1364 - DNA, 20 bp, synthetic construct
  source 1..20: mol_type = other DNA
acattcatacccatttcctc

SEQ ID NO: 1365 - DNA, 20 bp, synthetic construct
  source 1..20: mol_type = other DNA
actgatttgggatgggtgtc

SEQ ID NO: 1366 - DNA, 20 bp, synthetic construct
  source 1..20: mol_type = other DNA
atgtctgggtcttggttctc

SEQ ID NO: 1367 - DNA, 20 bp, synthetic construct
  source 1..20: mol_type = other DNA
gtctgtcttgtggtttggtt

SEQ ID NO: 1368 - DNA, 20 bp, synthetic construct
  source 1..20: mol_type = other DNA
caagtgttacctctgaagct

SEQ ID NO: 1369 - DNA, 20 bp, synthetic construct
  source 1..20: mol_type = other DNA
tggcggcactttgcctccca

SEQ ID NO: 1370 - DNA, 20 bp, synthetic construct
  source 1..20: mol_type = other DNA
acagattcttttccttgagg

SEQ ID NO: 1371 - DNA, 20 bp, synthetic construct
  source 1..20: mol_type = other DNA
aggctatagccgtactcaaa

SEQ ID NO: 1372 - DNA, 20 bp, synthetic construct
  source 1..20: mol_type = other DNA
acgagtggctagagtttcct

SEQ ID NO: 1373 - DNA, 20 bp, synthetic construct
  source 1..20: mol_type = other DNA
ccagtctctatcggagtcag

SEQ ID NO: 1374 - DNA, 20 bp, synthetic construct
  source 1..20: mol_type = other DNA
gggtcgtaagtaaagtacac

SEQ ID NO: 1375 - DNA, 20 bp, synthetic construct
  source 1..20: mol_type = other DNA
acactaagatgatgaagcca

SEQ ID NO: 1376 - DNA, 20 bp, synthetic construct
  source 1..20: mol_type = other DNA
tcaaatctgttctggaggta

SEQ ID NO: 1377 - DNA, 20 bp, synthetic construct
  source 1..20: mol_type = other DNA
gcggctacatctttggaatc

SEQ ID NO: 1378 - DNA, 20 bp, synthetic construct
  source 1..20: mol_type = other DNA
cggtaagctacatcgtgcat

SEQ ID NO: 1379 - DNA, 20 bp, synthetic construct
  source 1..20: mol_type = other DNA
atgcagttgggtggtagcag

SEQ ID NO: 1380 - DNA, 20 bp, synthetic construct
  source 1..20: mol_type = other DNA
aaagttggccttccacgtct

SEQ ID NO: 1381 - DNA, 20 bp, synthetic construct
  source 1..20: mol_type = other DNA
cgttaaacaagatctcagct

SEQ ID NO: 1382 - DNA, 20 bp, synthetic construct
  source 1..20: mol_type = other DNA
tgtcacactggattctctgg

SEQ ID NO: 1383 - DNA, 20 bp, synthetic construct
  source 1..20: mol_type = other DNA
acgtttgtcaatgtaaaggc

SEQ ID NO: 1384 - DNA, 20 bp, synthetic construct
  source 1..20: mol_type = other DNA
ggttcaggcagccctcagtg

SEQ ID NO: 1385 - DNA, 20 bp, synthetic construct
  source 1..20: mol_type = other DNA
gttggtcagcttcagcacgt

SEQ ID NO: 1386 - DNA, 20 bp, synthetic construct
  source 1..20: mol_type = other DNA
attagtcaggatagcaggca

SEQ ID NO: 1387 - DNA, 20 bp, synthetic construct
  source 1..20: mol_type = other DNA
gcctgtcgtaagtcaggatt

SEQ ID NO: 1388 - DNA, 20 bp, synthetic construct
  source 1..20: mol_type = other DNA
ctcgttagatgaagttcact

SEQ ID NO: 1389 - DNA, 20 bp, synthetic construct
  source 1..20: mol_type = other DNA
gtgaaatccatagaagtggc

SEQ ID NO: 1390 - DNA, 20 bp, synthetic construct
  source 1..20: mol_type = other DNA
cagtttaagagacccggtct

SEQ ID NO: 1391 - DNA, 20 bp, synthetic construct
  source 1..20: mol_type = other DNA
aggctggatttctgagaagc

SEQ ID NO: 1392 - DNA, 20 bp, synthetic construct
  source 1..20: mol_type = other DNA
ttttagcaatactccctgag

SEQ ID NO: 1393 - DNA, 20 bp, synthetic construct
  source 1..20: mol_type = other DNA
cccaagacagaaatcttagg

SEQ ID NO: 1394 - DNA, 20 bp, synthetic construct
  source 1..20: mol_type = other DNA
agtgattaggtcaaatccct

SEQ ID NO: 1395 - DNA, 20 bp, synthetic construct
  source 1..20: mol_type = other DNA
cgaagggtaaagtcgccatt

SEQ ID NO: 1396 - DNA, 20 bp, synthetic construct
  source 1..20: mol_type = other DNA
gatcatggtctggatctgca

SEQ ID NO: 1397 - DNA, 20 bp, synthetic construct
  source 1..20: mol_type = other DNA
gtgggtctgttttccgagga

SEQ ID NO: 1398 - DNA, 20 bp, synthetic construct
  source 1..20: mol_type = other DNA
tgtacctcaccctccactta

SEQ ID NO: 1399 - DNA, 20 bp, synthetic construct
  source 1..20: mol_type = other DNA
gctacacaatcattccgttc

SEQ ID NO: 1400 - DNA, 20 bp, synthetic construct
  source 1..20: mol_type = other DNA
cccacagaatggaagttcca

SEQ ID NO: 1401 - DNA, 20 bp, synthetic construct
  source 1..20: mol_type = other DNA
ttggatgctagctgcggagt

SEQ ID NO: 1402 - DNA, 20 bp, synthetic construct
  source 1..20: mol_type = other DNA
tcccaaaatcattctcagag

SEQ ID NO: 1403 - DNA, 20 bp, synthetic construct
  source 1..20: mol_type = other DNA
ttggaatgccatacttcttc

SEQ ID NO: 1404 - DNA, 20 bp, synthetic construct
  source 1..20: mol_type = other DNA
ggttttggtctgtccacggc

SEQ ID NO: 1405 - DNA, 20 bp, synthetic construct
  source 1..20: mol_type = other DNA
gctgaaggtctgcgtcacgt

SEQ ID NO: 1406 - DNA, 20 bp, synthetic construct
  source 1..20: mol_type = other DNA
gtggtgacaggtctttttgt

SEQ ID NO: 1407 - DNA, 20 bp, synthetic construct
  source 1..20: mol_type = other DNA
gtggaacgaggccttcccta

SEQ ID NO: 1408 - DNA, 20 bp, synthetic construct
  source 1..20: mol_type = other DNA
tggtggcatactccgtctgc

SEQ ID NO: 1409 - DNA, 20 bp, synthetic construct
  source 1..20: mol_type = other DNA
caaaaagcctgcgccgcctc

SEQ ID NO: 1410 - DNA, 20 bp, synthetic construct
  source 1..20: mol_type = other DNA
taagcgtagccaggttctgg

SEQ ID NO: 1411 - DNA, 20 bp, synthetic construct
  source 1..20: mol_type = other DNA
tcacaaggtccatctatttg

SEQ ID NO: 1412 - DNA, 20 bp, synthetic construct
  source 1..20: mol_type = other DNA
gttacttggtcgttcaagtc

SEQ ID NO: 1413 - DNA, 20 bp, synthetic construct
  source 1..20: mol_type = other DNA
aagggtagtgaagcctttct

SEQ ID NO: 1414 - DNA, 20 bp, synthetic construct
  source 1..20: mol_type = other DNA
tcaagtaagcgtaggagtcc

SEQ ID NO: 1415 - DNA, 20 bp, synthetic construct
  source 1..20: mol_type = other DNA
tgctgaagctgtactggtcc

SEQ ID NO: 1416 - DNA, 20 bp, synthetic construct
  source 1..20: mol_type = other DNA
gcaaagcattgtgggcaaag

SEQ ID NO: 1417 - DNA, 20 bp, synthetic construct
  source 1..20: mol_type = other DNA
cactagcctctttgcatcca

SEQ ID NO: 1418 - DNA, 20 bp, synthetic construct
  source 1..20: mol_type = other DNA
ctcaagtgttgcacataatc

SEQ ID NO: 1419 - DNA, 20 bp, synthetic construct
  source 1..20: mol_type = other DNA
tctgggtgctctgacatttc

SEQ ID NO: 1420 - DNA, 20 bp, synthetic construct
  source 1..20: mol_type = other DNA
tgcactgaaggaaacacact

SEQ ID NO: 1421 - DNA, 20 bp, synthetic construct
  source 1..20: mol_type = other DNA
ctggttgtagaactcctcga

SEQ ID NO: 1422 - DNA, 20 bp, synthetic construct
  source 1..20: mol_type = other DNA
taatcagggcattctgggta

SEQ ID NO: 1423 - DNA, 20 bp, synthetic construct
  source 1..20: mol_type = other DNA
ctctccgcaactatagtgaa

SEQ ID NO: 1424 - DNA, 20 bp, synthetic construct
  source 1..20: mol_type = other DNA
tgaatcttagcaggaaggtg

SEQ ID NO: 1425 - DNA, 20 bp, synthetic construct
  source 1..20: mol_type = other DNA
tcattgttagaagctgcctc

SEQ ID NO: 1426 - DNA, 20 bp, synthetic construct
  source 1..20: mol_type = other DNA
catacacacttggagacatg

SEQ ID NO: 1427 - DNA, 20 bp, synthetic construct
  source 1..20: mol_type = other DNA
cgaggagcttggaaaggagg

SEQ ID NO: 1428 - DNA, 20 bp, synthetic construct
  source 1..20: mol_type = other DNA
ggcccgtaaagaatggaatg

SEQ ID NO: 1429 - DNA, 20 bp, synthetic construct
  source 1..20: mol_type = other DNA
ggctggtacttatggaggga

SEQ ID NO: 1430 - DNA, 20 bp, synthetic construct
  source 1..20: mol_type = other DNA
atcttgcttcttgagatgtg

SEQ ID NO: 1431 - DNA, 20 bp, synthetic construct
  source 1..20: mol_type = other DNA
ccagaatctaagtcaaggat

SEQ ID NO: 1432 - DNA, 20 bp, synthetic construct
  source 1..20: mol_type = other DNA
tagtaaacgaaggtgaacag

SEQ ID NO: 1433 - DNA, 20 bp, synthetic construct
  source 1..20: mol_type = other DNA
actctggcgagtcgctgggt

SEQ ID NO: 1434 - DNA, 20 bp, synthetic construct
  source 1..20: mol_type = other DNA
ttcatgccatgaatggtggc

SEQ ID NO: 1435 - DNA, 20 bp, synthetic construct
  source 1..20: mol_type = other DNA
atgaggaatgtgtctctcag

SEQ ID NO: 1436 - DNA, 20 bp, synthetic construct
  source 1..20: mol_type = other DNA
gccagaagctggtcctgctg

SEQ ID NO: 1437 - DNA, 20 bp, synthetic construct
  source 1..20: mol_type = other DNA
taggtgatcctgttgttgga

SEQ ID NO: 1438 - DNA, 20 bp, synthetic construct
  source 1..20: mol_type = other DNA
gcatgctttgggaccaaaag

SEQ ID NO: 1439 - DNA, 20 bp, synthetic construct
  source 1..20: mol_type = other DNA
aaactcaaggcttggtagat

SEQ ID NO: 1440 - DNA, 20 bp, synthetic construct
  source 1..20: mol_type = other DNA
aatcaagaaaaggtgacctc

SEQ ID NO: 1441 - DNA, 20 bp, synthetic construct
  source 1..20: mol_type = other DNA
agtcgaccttcggtttgctc

SEQ ID NO: 1442 - DNA, 20 bp, synthetic construct
  source 1..20: mol_type = other DNA
agctgtatcggcaactgaaa

SEQ ID NO: 1443 - DNA, 20 bp, synthetic construct
  source 1..20: mol_type = other DNA
ctgccaaggtttttattgtg

SEQ ID NO: 1444 - DNA, 20 bp, synthetic construct
  source 1..20: mol_type = other DNA
caagaaagaaggagatgatc

SEQ ID NO: 1445 - DNA, 20 bp, synthetic construct
  source 1..20: mol_type = other DNA
gggatacttacatgacactt

SEQ ID NO: 1446 - DNA, 20 bp, synthetic construct
  source 1..20: mol_type = other DNA
tagatgtcccatggcgtagg

SEQ ID NO: 1447 - DNA, 20 bp, synthetic construct
  source 1..20: mol_type = other DNA
cactacttgaactttgaagg

SEQ ID NO: 1448 - DNA, 20 bp, synthetic construct
  source 1..20: mol_type = other DNA
ccaagtatcacacaggaggt

SEQ ID NO: 1449 - DNA, 20 bp, synthetic construct
  source 1..20: mol_type = other DNA
tagtcgggccgattgatctc

SEQ ID NO: 1450 - DNA, 20 bp, synthetic construct
  source 1..20: mol_type = other DNA
gtttcgaagtggtggtcttg

SEQ ID NO: 1451 - DNA, 20 bp, synthetic construct
  source 1..20: mol_type = other DNA
agttgctgtcgtgatgagaa

SEQ ID NO: 1452 - DNA, 20 bp, synthetic construct
  source 1..20: mol_type = other DNA
cttactgtgggcacagaatc

SEQ ID NO: 1453 - DNA, 20 bp, synthetic construct
  source 1..20: mol_type = other DNA
acccaagacagcagaaagtt

SEQ ID NO: 1454 - DNA, 20 bp, synthetic construct
  source 1..20: mol_type = other DNA
ttcccaaaactgggtcatat

SEQ ID NO: 1455 - DNA, 20 bp, synthetic construct
  source 1..20: mol_type = other DNA
tgtcaccagacgcggtgtga

SEQ ID NO: 1456 - DNA, 20 bp, synthetic construct
  source 1..20: mol_type = other DNA
agaaaagcagcaggcggtgg

SEQ ID NO: 1457 - DNA, 20 bp, synthetic construct
  source 1..20: mol_type = other DNA
gctgcaactgaagctctgcc

SEQ ID NO: 1458 - DNA, 20 bp, synthetic construct
  source 1..20: mol_type = other DNA
tctgaatctgggcttggagg

SEQ ID NO: 1459 - DNA, 20 bp, synthetic construct
  source 1..20: mol_type = other DNA
tagcgatgctttcccatgcc

SEQ ID NO: 1460 - DNA, 20 bp, synthetic construct
  source 1..20: mol_type = other DNA
catgttgtctccaagctggt

SEQ ID NO: 1461 - DNA, 20 bp, synthetic construct
  source 1..20: mol_type = other DNA
ttggagatggtccagttctg

SEQ ID NO: 1462 - DNA, 20 bp, synthetic construct
  source 1..20: mol_type = other DNA
ggctctgagttctatgtttc

SEQ ID NO: 1463 - DNA, 20 bp, synthetic construct
  source 1..20: mol_type = other DNA
cacgtgaaggtgagctcatc

SEQ ID NO: 1464 - DNA, 20 bp, synthetic construct
  source 1..20: mol_type = other DNA
caaggagctgttctgtggga

SEQ ID NO: 1465 - DNA, 20 bp, synthetic construct
  source 1..20: mol_type = other DNA
cgtgaggttcgcttctgaac

SEQ ID NO: 1466 - DNA, 20 bp, synthetic construct
  source 1..20: mol_type = other DNA
gtcttcgtggctcacgtcca

SEQ ID NO: 1467 - DNA, 20 bp, synthetic construct
  source 1..20: mol_type = other DNA
ccttcgcagctctcggaagc

SEQ ID NO: 1468 - DNA, 20 bp, synthetic construct
  source 1..20: mol_type = other DNA
ttgcttttgccatcgtgttg

SEQ ID NO: 1469 - DNA, 20 bp, synthetic construct
  source 1..20: mol_type = other DNA
gagtctaagaaatctgacag

SEQ ID NO: 1470 - DNA, 20 bp, synthetic construct
  source 1..20: mol_type = other DNA
ggcgcgttccaggtctctcc

SEQ ID NO: 1471 - DNA, 20 bp, synthetic construct
  source 1..20: mol_type = other DNA
gctgctattgtgaagggcat

SEQ ID NO: 1472 - DNA, 20 bp, synthetic construct
  source 1..20: mol_type = other DNA
gttccgtgacagatccaagg

SEQ ID NO: 1473 - DNA, 20 bp, synthetic construct
  source 1..20: mol_type = other DNA
actgacccggtccgtgtggg

SEQ ID NO: 1474 - DNA, 20 bp, synthetic construct
  source 1..20: mol_type = other DNA
tttggccacctttccctgcc

SEQ ID NO: 1475 - DNA, 20 bp, synthetic construct
  source 1..20: mol_type = other DNA
gaaccagcctcttctgtgtc

SEQ ID NO: 1476 - DNA, 20 bp, synthetic construct
  source 1..20: mol_type = other DNA
tgaccatcattggtcacctt

SEQ ID NO: 1477 - DNA, 20 bp, synthetic construct
  source 1..20: mol_type = other DNA
gaagtgatgggagaggcagc

SEQ ID NO: 1478 - DNA, 20 bp, synthetic construct
  source 1..20: mol_type = other DNA
ttcgatttgggatttaggca

SEQ ID NO: 1479 - DNA, 20 bp, synthetic construct
  source 1..20: mol_type = other DNA
cctttcatccttcacataac

SEQ ID NO: 1480 - DNA, 20 bp, synthetic construct
  source 1..20: mol_type = other DNA
gtgagtttttaagcagagga

SEQ ID NO: 1481 - DNA, 20 bp, synthetic construct
  source 1..20: mol_type = other DNA
atatcagcatcagggaatct

SEQ ID NO: 1482 - DNA, 20 bp, synthetic construct
  source 1..20: mol_type = other DNA
ctgggtttagacatgtttga

SEQ ID NO: 1483 - DNA, 20 bp, synthetic construct
  source 1..20: mol_type = other DNA
gatcgaccctttaaagagct

SEQ ID NO: 1484 - DNA, 20 bp, synthetic construct
  source 1..20: mol_type = other DNA
taggaggcctctgaggtctc

SEQ ID NO: 1485 - DNA, 20 bp, synthetic construct
  source 1..20: mol_type = other DNA
taccctgctttctcggccac

SEQ ID NO: 1486 - DNA, 20 bp, synthetic construct
  source 1..20: mol_type = other DNA
ccaacaggcgaagaaagcca

SEQ ID NO: 1487 - DNA, 20 bp, synthetic construct
  source 1..20: mol_type = other DNA
gccaaccatgatgtgctgaa

SEQ ID NO: 1488 - DNA, 20 bp, synthetic construct
  source 1..20: mol_type = other DNA
cttcctcgttgtcctgccgt

SEQ ID NO: 1489 - DNA, 20 bp, synthetic construct
  source 1..20: mol_type = other DNA
gtttttagggactgagttgt

SEQ ID NO: 1490 - DNA, 20 bp, synthetic construct
  source 1..20: mol_type = other DNA
tctgcctctacttctgtgat

SEQ ID NO: 1491 - DNA, 20 bp, synthetic construct
  source 1..20: mol_type = other DNA
acgatgaggttacctttcct

SEQ ID NO: 1492 - DNA, 20 bp, synthetic construct
  source 1..20: mol_type = other DNA
ggaattcgctccactgtgtt

SEQ ID NO: 1493 - DNA, 20 bp, synthetic construct
  source 1..20: mol_type = other DNA
gtcccaaacagttttttcca

SEQ ID NO: 1494 - DNA, 20 bp, synthetic construct
  source 1..20: mol_type = other DNA
ctaccatacaaccacgcagt

SEQ ID NO: 1495 - DNA, 20 bp, synthetic construct
  source 1..20: mol_type = other DNA
gcgggaaacggatacgcctt

SEQ ID NO: 1496 - DNA, 20 bp, synthetic construct
  source 1..20: mol_type = other DNA
gaagtggagcatcgttagct

SEQ ID NO: 1497 - DNA, 20 bp, synthetic construct
  source 1..20: mol_type = other DNA
ctgttacgtgtaacgccatt

SEQ ID NO: 1498 - DNA, 20 bp, synthetic construct
  source 1..20: mol_type = other DNA
cacagttgaggttatctctg

SEQ ID NO: 1499 - DNA, 20 bp, synthetic construct
  source 1..20: mol_type = other DNA
gacgcgacgcataaaaagcg

SEQ ID NO: 1500 - DNA, 20 bp, synthetic construct
  source 1..20: mol_type = other DNA
gtcaggctatgattcaccac

SEQ ID NO: 1501 - DNA, 20 bp, synthetic construct
  source 1..20: mol_type = other DNA
gcccggttcgctggctcagt

SEQ ID NO: 1502 - DNA, 20 bp, synthetic construct
  source 1..20: mol_type = other DNA
tacgggccttcgcaatcgcg

SEQ ID NO: 1503 - DNA, 20 bp, synthetic construct
  source 1..20: mol_type = other DNA
aatgtcccgtctcgagctgg

SEQ ID NO: 1504 - DNA, 20 bp, synthetic construct
  source 1..20: mol_type = other DNA
tgacaaacactgcatttcga

SEQ ID NO: 1505 - DNA, 20 bp, synthetic construct
  source 1..20: mol_type = other DNA
ctctgaagacatttttggac

SEQ ID NO: 1506 - DNA, 20 bp, synthetic construct
  source 1..20: mol_type = other DNA
gtgacaaactttttggcgtc

SEQ ID NO: 1507 - DNA, 20 bp, synthetic construct
  source 1..20: mol_type = other DNA
ggcatggattttcacaaacc

SEQ ID NO: 1508 - DNA, 20 bp, synthetic construct
  source 1..20: mol_type = other DNA
aacggagggacatttttgac

SEQ ID NO: 1509 - DNA, 20 bp, synthetic construct
  source 1..20: mol_type = other DNA
agtgccaaccaaaaatgcaa

SEQ ID NO: 1510 - DNA, 20 bp, synthetic construct
  source 1..20: mol_type = other DNA
gtacatccagagctccaaac

SEQ ID NO: 1511 - DNA, 20 bp, synthetic construct
  source 1..20: mol_type = other DNA
taggatgagttcaggttttc

SEQ ID NO: 1512 - DNA, 20 bp, synthetic construct
  source 1..20: mol_type = other DNA
aggtagtcagtcacatcttc

SEQ ID NO: 1513 - DNA, 20 bp, synthetic construct
  source 1..20: mol_type = other DNA
ccgagatgacgcacatcagc

SEQ ID NO: 1514 - DNA, 20 bp, synthetic construct
  source 1..20: mol_type = other DNA
gaaaccgtcatggtgctggg

SEQ ID NO: 1515 - DNA, 20 bp, synthetic construct
  source 1..20: mol_type = other DNA
gtgaagtcagcactcttgcc

SEQ ID NO: 1516 - DNA, 20 bp, synthetic construct
  source 1..20: mol_type = other DNA
aacaactttctgaaggcccg

SEQ ID NO: 1517 - DNA, 20 bp, synthetic construct
  source 1..20: mol_type = other DNA
ctgtcagacgattcatgctg

SEQ ID NO: 1518 - DNA, 20 bp, synthetic construct
  source 1..20: mol_type = other DNA
gtgattggcgatctccctgg

SEQ ID NO: 1519 - DNA, 20 bp, synthetic construct
  source 1..20: mol_type = other DNA
gcacctccgacatggtcgcg

SEQ ID NO: 1520 - DNA, 20 bp, synthetic construct
  source 1..20: mol_type = other DNA
tctcccttaactcattgtct

SEQ ID NO: 1521 - DNA, 20 bp, synthetic construct
  source 1..20: mol_type = other DNA
aacgatggacattcgtccag

SEQ ID NO: 1522 - DNA, 20 bp, synthetic construct
  source 1..20: mol_type = other DNA
tctggaattccctctggaat

SEQ ID NO: 1523 - DNA, 20 bp, synthetic construct
  source 1..20: mol_type = other DNA
gatttgcgcacacagacaac

SEQ ID NO: 1524 - DNA, 20 bp, synthetic construct
  source 1..20: mol_type = other DNA
ccgcctttaaggatatatag

SEQ ID NO: 1525 - DNA, 20 bp, synthetic construct
  source 1..20: mol_type = other DNA
gagcgatataggccacttct

SEQ ID NO: 1526 - DNA, 20 bp, synthetic construct
  source 1..20: mol_type = other DNA
gagaggaattcccaacataa

SEQ ID NO: 1527 - DNA, 20 bp, synthetic construct
  source 1..20: mol_type = other DNA
cccaatactcatcttgcagt

SEQ ID NO: 1528 - DNA, 20 bp, synthetic construct
  source 1..20: mol_type = other DNA
cggcattgtaggtgttcaca

SEQ ID NO: 1529 - DNA, 20 bp, synthetic construct
  source 1..20: mol_type = other DNA
tacgtgctgttcttcacgtg

SEQ ID NO: 1530 - DNA, 20 bp, synthetic construct
  source 1..20: mol_type = other DNA
cactgacatacattcagccc

SEQ ID NO: 1531 - DNA, 20 bp, synthetic construct
  source 1..20: mol_type = other DNA
acatggtggcgagggtccgg

SEQ ID NO: 1532 - DNA, 20 bp, synthetic construct
  source 1..20: mol_type = other DNA
gagaaggcattactgccttt

SEQ ID NO: 1533 - DNA, 20 bp, synthetic construct
  source 1..20: mol_type = other DNA
gctcccacttctcaaggacc

SEQ ID NO: 1534 - DNA, 20 bp, synthetic construct
  source 1..20: mol_type = other DNA
attattgcggccagtagcca

SEQ ID NO: 1535 - DNA, 20 bp, synthetic construct
  source 1..20: mol_type = other DNA
ggtggccaaaaggaatcact

SEQ ID NO: 1536 - DNA, 20 bp, synthetic construct
  source 1..20: mol_type = other DNA
agaagttattgcagttgtgc

SEQ ID NO: 1537 - DNA, 20 bp, synthetic construct
  source 1..20: mol_type = other DNA
aggctgcaatagccgtacca

SEQ ID NO: 1538 - DNA, 20 bp, synthetic construct
  source 1..20: mol_type = other DNA
gagggtgtacaagttcatgg

SEQ ID NO: 1539 - DNA, 20 bp, synthetic construct
  source 1..20: mol_type = other DNA
taaagcacccacttatagtg

SEQ ID NO: 1540 - DNA, 20 bp, synthetic construct
  source 1..20: mol_type = other DNA
tacagtgctccactctgctg

SEQ ID NO: 1541 - DNA, 20 bp, synthetic construct
  source 1..20: mol_type = other DNA
cctggcagtgtttgctcctc

SEQ ID NO: 1542 - DNA, 20 bp, synthetic construct
  source 1..20: mol_type = other DNA
ggctgatcttcattgtactc

SEQ ID NO: 1543 - DNA, 20 bp, synthetic construct
  source 1..20: mol_type = other DNA
taggagtaaatcctccactg

SEQ ID NO: 1544 - DNA, 20 bp, synthetic construct
  source 1..20: mol_type = other DNA
ccaatgacagccatcctcat

SEQ ID NO: 1545 - DNA, 20 bp, synthetic construct
  source 1..20: mol_type = other DNA
ccgtgtacttcttctcgcgt

SEQ ID NO: 1546 - DNA, 20 bp, synthetic construct
  source 1..20: mol_type = other DNA
ggagtaaggcttgtctgtgc

SEQ ID NO: 1547 - DNA, 20 bp, synthetic construct
  source 1..20: mol_type = other DNA
gtccacgggagttgaggacc

SEQ ID NO: 1548 - DNA, 20 bp, synthetic construct
  source 1..20: mol_type = other DNA
gtcacagtgatgggatcaga

SEQ ID NO: 1549 - DNA, 20 bp, synthetic construct
  source 1..20: mol_type = other DNA
gagagtagagagggttcgca

SEQ ID NO: 1550 - DNA, 20 bp, synthetic construct
  source 1..20: mol_type = other DNA
catttcttatagcttggcct

SEQ ID NO: 1551 - DNA, 20 bp, synthetic construct
  source 1..20: mol_type = other DNA
cgtcttagaagaaagatccc

SEQ ID NO: 1552 - DNA, 20 bp, synthetic construct
  source 1..20: mol_type = other DNA
gatctcacgtccataggtac

SEQ ID NO: 1553 - DNA, 20 bp, synthetic construct
  source 1..20: mol_type = other DNA
cagatatgccttgatggaag

SEQ ID NO: 1554 - DNA, 20 bp, synthetic construct
  source 1..20: mol_type = other DNA
acttgtcctgctacgcacat

SEQ ID NO: 1555 - DNA, 20 bp, synthetic construct
  source 1..20: mol_type = other DNA
cccttcttcattgttggaga

SEQ ID NO: 1556 - DNA, 20 bp, synthetic construct
  source 1..20: mol_type = other DNA
cgtttcttgtaatcttgtgg

SEQ ID NO: 1557 - DNA, 20 bp, synthetic construct
  source 1..20: mol_type = other DNA
acaagagcctctataccacc

SEQ ID NO: 1558 - DNA, 20 bp, synthetic construct
  source 1..20: mol_type = other DNA
gccaggtgtaatttttcaag

SEQ ID NO: 1559 - DNA, 20 bp, synthetic construct
  source 1..20: mol_type = other DNA
ctgaagaatccaactccact

SEQ ID NO: 1560 - DNA, 20 bp, synthetic construct
  source 1..20: mol_type = other DNA
gtgaactcatcccagccaga

SEQ ID NO: 1561 - DNA, 20 bp, synthetic construct
  source 1..20: mol_type = other DNA
cagaacctgcgtcttcgacc

SEQ ID NO: 1562 - DNA, 20 bp, synthetic construct
  source 1..20: mol_type = other DNA
atccacacgggtaagttcat

SEQ ID NO: 1563 - DNA, 20 bp, synthetic construct
  source 1..20: mol_type = other DNA
tcgcagtcaggatcataaag

SEQ ID NO: 1564 - DNA, 20 bp, synthetic construct
  source 1..20: mol_type = other DNA
aggagcgctgctctgaagcc

SEQ ID NO: 1565 - DNA, 20 bp, synthetic construct
  source 1..20: mol_type = other DNA
aaggttgtgtaatctgggac

SEQ ID NO: 1566 - DNA, 20 bp, synthetic construct
  source 1..20: mol_type = other DNA
cgaaagtccagccggctgct

SEQ ID NO: 1567 - DNA, 20 bp, synthetic construct
  source 1..20: mol_type = other DNA
gcaatagagctccctcttca

SEQ ID NO: 1568 - DNA, 20 bp, synthetic construct
  source 1..20: mol_type = other DNA
caaatacatgttgagcacca

SEQ ID NO: 1569 - DNA, 20 bp, synthetic construct
  source 1..20: mol_type = other DNA
aaccaggatggccagttaat

SEQ ID NO: 1570 - DNA, 20 bp, synthetic construct
  source 1..20: mol_type = other DNA
cagtgtctcagtttggatct

SEQ ID NO: 1571 - DNA, 20 bp, synthetic construct
  source 1..20: mol_type = other DNA
tctgagttcaagttgcctcg

SEQ ID NO: 1572 - DNA, 20 bp, synthetic construct
  source 1..20: mol_type = other DNA
ggcctgggatatcagccatg

SEQ ID NO: 1573 - DNA, 20 bp, synthetic construct
  source 1..20: mol_type = other DNA
catcggttattttgcatcac

SEQ ID NO: 1574 - DNA, 20 bp, synthetic construct
  source 1..20: mol_type = other DNA
aaccagaaaaatctccacac

SEQ ID NO: 1575 - DNA, 20 bp, synthetic construct
  source 1..20: mol_type = other DNA
gatctgaatctcccgctgaa

SEQ ID NO: 1576 - DNA, 20 bp, synthetic construct
  source 1..20: mol_type = other DNA
tctacgatttctggaaagtc

SEQ ID NO: 1577 - DNA, 20 bp, synthetic construct
  source 1..20: mol_type = other DNA
gtctgtctcactgggtttgc

SEQ ID NO: 1578 - DNA, 20 bp, synthetic construct
  source 1..20: mol_type = other DNA
cattttgcagttgagcatcc

SEQ ID NO: 1579 - DNA, 20 bp, synthetic construct
  source 1..20: mol_type = other DNA
catagttcaccgtgtgtctg

SEQ ID NO: 1580 - DNA, 20 bp, synthetic construct
  source 1..20: mol_type = other DNA
aacaaactggatgggattgt

SEQ ID NO: 1581 - DNA, 20 bp, synthetic construct
  source 1..20: mol_type = other DNA
gggaatgtatgtcagagcgt

SEQ ID NO: 1582 - DNA, 20 bp, synthetic construct
  source 1..20: mol_type = other DNA
ggcatcagatgccttcatca

SEQ ID NO: 1583 - DNA, 20 bp, synthetic construct
  source 1..20: mol_type = other DNA
gagtgtgcattaccagagac

SEQ ID NO: 1584 - DNA, 20 bp, synthetic construct
  source 1..20: mol_type = other DNA
gtgggccacattttctaaac

SEQ ID NO: 1585 - DNA, 20 bp, synthetic construct
  source 1..20: mol_type = other DNA
gtgttttccttccaagccca

SEQ ID NO: 1586 - DNA, 20 bp, synthetic construct
  source 1..20: mol_type = other DNA
ctttggtgcacttgttcaca

SEQ ID NO: 1587 - DNA, 20 bp, synthetic construct
  source 1..20: mol_type = other DNA
atgatcaatgcgagcagcag

SEQ ID NO: 1588 - DNA, 20 bp, synthetic construct
  source 1..20: mol_type = other DNA
tgctgggatcttccagagag

SEQ ID NO: 1589 - DNA, 20 bp, synthetic construct
  source 1..20: mol_type = other DNA
tgcaccagagtagaagctga

SEQ ID NO: 1590 - DNA, 20 bp, synthetic construct
  source 1..20: mol_type = other DNA
catcgaaggtggtgatgtgg

SEQ ID NO: 1591 - DNA, 20 bp, synthetic construct
  source 1..20: mol_type = other DNA
cttggtgcagccggcgtacg

SEQ ID NO: 1592 - DNA, 20 bp, synthetic construct
  source 1..20: mol_type = other DNA
cgctggtcttccggtcccag

SEQ ID NO: 1593 - DNA, 20 bp, synthetic construct
  source 1..20: mol_type = other DNA
aggtgacgctcacgcccagg

SEQ ID NO: 1594 - DNA, 20 bp, synthetic construct
  source 1..20: mol_type = other DNA
catgttcccgttgaagttgc

SEQ ID NO: 1595 - DNA, 20 bp, synthetic construct
  source 1..20: mol_type = other DNA
tcaccttcccgtcaaagttc

SEQ ID NO: 1596 - DNA, 20 bp, synthetic construct
  source 1..20: mol_type = other DNA
agagaagttgccattgatgc

SEQ ID NO: 1597 - DNA, 20 bp, synthetic construct
  source 1..20: mol_type = other DNA
aagcgtctgaacgaaggaga

SEQ ID NO: 1598 - DNA, 20 bp, synthetic construct
  source 1..20: mol_type = other DNA
cacagaaaatctgagaaagc

SEQ ID NO: 1599 - DNA, 20 bp, synthetic construct
  source 1..20: mol_type = other DNA
tgcttttgagggccgccgcc

SEQ ID NO: 1600 - DNA, 20 bp, synthetic construct
  source 1..20: mol_type = other DNA
gtccaggtctatgggaaccc

SEQ ID NO: 1601 - DNA, 20 bp, synthetic construct
  source 1..20: mol_type = other DNA
taccttccgattccttgtgc

SEQ ID NO: 1602 - DNA, 20 bp, synthetic construct
  source 1..20: mol_type = other DNA
gattttcattcctgccatca

SEQ ID NO: 1603 - DNA, 20 bp, synthetic construct
  source 1..20: mol_type = other DNA
ttcacgatggctttgctatc

SEQ ID NO: 1604 - DNA, 20 bp, synthetic construct
  source 1..20: mol_type = other DNA
atccaatcacccacatgcat

SEQ ID NO: 1605 - DNA, 20 bp, synthetic construct
  source 1..20: mol_type = other DNA
ctatgcacctaaacattgct

SEQ ID NO: 1606 - DNA, 20 bp, synthetic construct
  source 1..20: mol_type = other DNA
agccggtgaaattggaaaac

SEQ ID NO: 1607 - DNA, 20 bp, synthetic construct
  source 1..20: mol_type = other DNA
ccgcaacttgccactgtcgg

SEQ ID NO: 1608 - DNA, 20 bp, synthetic construct
  source 1..20: mol_type = other DNA
ctgtcgtttgtattcagcaa

SEQ ID NO: 1609 - DNA, 20 bp, synthetic construct
  source 1..20: mol_type = other DNA
ggttgcttctgagcacaggg

SEQ ID NO: 1610 - DNA, 20 bp, synthetic construct
  source 1..20: mol_type = other DNA
cagggctttgagtctcgatc

SEQ ID NO: 1611 - DNA, 20 bp, synthetic construct
  source 1..20: mol_type = other DNA
cactgcagggaatgaacagc

SEQ ID NO: 1612 - DNA, 20 bp, synthetic construct
  source 1..20: mol_type = other DNA
taaaaaattccctagcggct

SEQ ID NO: 1613 - DNA, 20 bp, synthetic construct
  source 1..20: mol_type = other DNA
gtctggcattctggcttcag

SEQ ID NO: 1614 - DNA, 20 bp, synthetic construct
  source 1..20: mol_type = other DNA
ctatgagcagcttcccatca

SEQ ID NO: 1615 - DNA, 20 bp, synthetic construct
  source 1..20: mol_type = other DNA
ctaagatggttcagcaggca

SEQ ID NO: 1616 - DNA, 20 bp, synthetic construct
  source 1..20: mol_type = other DNA
actaagcctaggcgaggacc

SEQ ID NO: 1617 - DNA, 20 bp, synthetic construct
  source 1..20: mol_type = other DNA
cgtggaatcggctacatccc

SEQ ID NO: 1618 - DNA, 20 bp, synthetic construct
  source 1..20: mol_type = other DNA
aacatgcccagggcacccac

SEQ ID NO: 1619 - DNA, 20 bp, synthetic construct
  source 1..20: mol_type = other DNA
gaacttggtgcctcctgcct

SEQ ID NO: 1620 - DNA, 20 bp, synthetic construct
  source 1..20: mol_type = other DNA
gtacttagccagttttaccg

SEQ ID NO: 1621 - DNA, 20 bp, synthetic construct
  source 1..20: mol_type = other DNA
gttcacgatgtccttgaagc

SEQ ID NO: 1622 - DNA, 20 bp, synthetic construct
  source 1..20: mol_type = other DNA
aatgcccattggatggctac

SEQ ID NO: 1623 - DNA, 20 bp, synthetic construct
  source 1..20: mol_type = other DNA
cgcttttaccgcgacctgac

SEQ ID NO: 1624 - DNA, 20 bp, synthetic construct
  source 1..20: mol_type = other DNA
atgtgctagtggtttttgtc

SEQ ID NO: 1625 - DNA, 20 bp, synthetic construct
  source 1..20: mol_type = other DNA
tagccaggattaacactgct

SEQ ID NO: 1626 - DNA, 20 bp, synthetic construct
  source 1..20: mol_type = other DNA
ccagaccaggatctgtacag

SEQ ID NO: 1627 - DNA, 20 bp, synthetic construct
  source 1..20: mol_type = other DNA
tctctattactcctcggttc

SEQ ID NO: 1628 - DNA, 20 bp, synthetic construct
  source 1..20: mol_type = other DNA
agggcagaatagcaaaatac

SEQ ID NO: 1629 - DNA, 20 bp, synthetic construct
  source 1..20: mol_type = other DNA
ttgaagttcgctgggtgcag

SEQ ID NO: 1630 - DNA, 20 bp, synthetic construct
  source 1..20: mol_type = other DNA
gttggtaacacttcagctga

SEQ ID NO: 1631 - DNA, 20 bp, synthetic construct
  source 1..20: mol_type = other DNA
ctgggtgactgaagtatgaa

SEQ ID NO: 1632 - DNA, 20 bp, synthetic construct
  source 1..20: mol_type = other DNA
gtcatgttctctgttctctc

SEQ ID NO: 1633 - DNA, 20 bp, synthetic construct
  source 1..20: mol_type = other DNA
cggctcgggttacacacgca

SEQ ID NO: 1634 - DNA, 20 bp, synthetic construct
  source 1..20: mol_type = other DNA
tgcagccacgaacactatga

SEQ ID NO: 1635 - DNA, 20 bp, synthetic construct
  source 1..20: mol_type = other DNA
agtgacgcaggagaatctcg

SEQ ID NO: 1636 - DNA, 20 bp, synthetic construct
  source 1..20: mol_type = other DNA
gcgtccggatcagcacccaa

SEQ ID NO: 1637 - DNA, 20 bp, synthetic construct
  source 1..20: mol_type = other DNA
aagtcccatagatggtcggg

SEQ ID NO: 1638 - DNA, 20 bp, synthetic construct
  source 1..20: mol_type = other DNA
tccatgacacttcgctggtg

SEQ ID NO: 1639 - DNA, 20 bp, synthetic construct
  source 1..20: mol_type = other DNA
gagaaccacgagttctcacc

SEQ ID NO: 1640 - DNA, 20 bp, synthetic construct
  source 1..20: mol_type = other DNA
tgcacattacttcagaaacc

SEQ ID NO: 1641 - DNA, 20 bp, synthetic construct
  source 1..20: mol_type = other DNA
ccatgaaggacgtgagcatg

SEQ ID NO: 1642 - DNA, 20 bp, synthetic construct
  source 1..20: mol_type = other DNA
ccagcaactgcccactccgg

SEQ ID NO: 1643 - DNA, 20 bp, synthetic construct
  source 1..20: mol_type = other DNA
gatcatgccgatgatggcca

SEQ ID NO: 1644 - DNA, 20 bp, synthetic construct
  source 1..20: mol_type = other DNA
gtcacaagcccatgtgtctg

SEQ ID NO: 1645 - DNA, 20 bp, synthetic construct
  source 1..20: mol_type = other DNA
gggaaaggaaggtccttccg

SEQ ID NO: 1646 - DNA, 20 bp, synthetic construct
  source 1..20: mol_type = other DNA
acttcctttcggccacacac

SEQ ID NO: 1647 - DNA, 20 bp, synthetic construct
  source 1..20: mol_type = other DNA
gggttcagacagcagctctg

SEQ ID NO: 1648 - DNA, 20 bp, synthetic construct
  source 1..20: mol_type = other DNA
tggtcggtgcagtcggccca

SEQ ID NO: 1649 - DNA, 20 bp, synthetic construct
  source 1..20: mol_type = other DNA
cttttgcaggatcagcgcgc

SEQ ID NO: 1650 - DNA, 20 bp, synthetic construct
  source 1..20: mol_type = other DNA
tcttcttgtgtctgctgagc

SEQ ID NO: 1651 - DNA, 20 bp, synthetic construct
  source 1..20: mol_type = other DNA
ttgttcctatggtggcttcc

SEQ ID NO: 1652 - DNA, 20 bp, synthetic construct
  source 1..20: mol_type = other DNA
tatgggaggaatgtagttgc

SEQ ID NO: 1653 - DNA, 20 bp, synthetic construct
  source 1..20: mol_type = other DNA
acatctgcaccaaggcaagg

SEQ ID NO: 1654 - DNA, 20 bp, synthetic construct
  source 1..20: mol_type = other DNA
aacctcagaaagtctcaggc

SEQ ID NO: 1655 - DNA, 20 bp, synthetic construct
  source 1..20: mol_type = other DNA
ccacccaaggcatcattcgt

SEQ ID NO: 1656 - DNA, 20 bp, synthetic construct
  source 1..20: mol_type = other DNA
tactggcagttgtcccgttc

SEQ ID NO: 1657 - DNA, 20 bp, synthetic construct
  source 1..20: mol_type = other DNA
acggagtttgtggtgtatga

SEQ ID NO: 1658 - DNA, 20 bp, synthetic construct
  source 1..20: mol_type = other DNA
ttcgccttcagttttggaag

SEQ ID NO: 1659 - DNA, 20 bp, synthetic construct
  source 1..20: mol_type = other DNA
gggcttccttcagtattttc

SEQ ID NO: 1660 - DNA, 20 bp, synthetic construct
  source 1..20: mol_type = other DNA
tacatgtccacataactacg

SEQ ID NO: 1661 - DNA, 20 bp, synthetic construct
  source 1..20: mol_type = other DNA
aggacggatggaaaaacctg

SEQ ID NO: 1662 - DNA, 20 bp, synthetic construct
  source 1..20: mol_type = other DNA
tctgaagcgccaagagaagc

SEQ ID NO: 1663 - DNA, 20 bp, synthetic construct
  source 1..20: mol_type = other DNA
ctagacaggcacataattca

SEQ ID NO: 1664 - DNA, 20 bp, synthetic construct
  source 1..20: mol_type = other DNA
gaaccagttcttccatctgt

SEQ ID NO: 1665 - DNA, 20 bp, synthetic construct
  source 1..20: mol_type = other DNA
aagttcatgagggcccgggc

SEQ ID NO: 1666 - DNA, 20 bp, synthetic construct
  source 1..20: mol_type = other DNA
ggtggcacggcgatagcctt

SEQ ID NO: 1667 - DNA, 20 bp, synthetic construct
  source 1..20: mol_type = other DNA
aagctgtcaaccttctgctt

SEQ ID NO: 1668 - DNA, 20 bp, synthetic construct
  source 1..20: mol_type = other DNA
gtctgccatcttatacacag

SEQ ID NO: 1669 - DNA, 20 bp, synthetic construct
  source 1..20: mol_type = other DNA
agtgctagtttcctgtatct

SEQ ID NO: 1670 - DNA, 20 bp, synthetic construct
  source 1..20: mol_type = other DNA
cgatgtgtttagtcaagttc

SEQ ID NO: 1671 - DNA, 20 bp, synthetic construct
  source 1..20: mol_type = other DNA
ggtgaacacctccttcatgt

SEQ ID NO: 1672 - DNA, 20 bp, synthetic construct
  source 1..20: mol_type = other DNA
tagcatcatgcgcaacagtg

SEQ ID NO: 1673 - DNA, 20 bp, synthetic construct
  source 1..20: mol_type = other DNA
aactgcttgtagctcctctt

SEQ ID NO: 1674 - DNA, 20 bp, synthetic construct
  source 1..20: mol_type = other DNA
gcaaaatagtcctcacaatc

SEQ ID NO: 1675 - DNA, 20 bp, synthetic construct
  source 1..20: mol_type = other DNA
catcagcatcaaattgcgct

SEQ ID NO: 1676 - DNA, 20 bp, synthetic construct
  source 1..20: mol_type = other DNA
ccacctttggatgacttcac

SEQ ID NO: 1677 - DNA, 20 bp, synthetic construct
  source 1..20: mol_type = other DNA
caaccaattggtttcttctc

SEQ ID NO: 1678 - DNA, 20 bp, synthetic construct
  source 1..20: mol_type = other DNA
aacccaggctaaccgactgc

SEQ ID NO: 1679 - DNA, 20 bp, synthetic construct
  source 1..20: mol_type = other DNA
cctttactttgtctcctttc

SEQ ID NO: 1680 - DNA, 20 bp, synthetic construct
  source 1..20: mol_type = other DNA
cctgtccgttggaactcagg

SEQ ID NO: 1681 - DNA, 20 bp, synthetic construct
  source 1..20: mol_type = other DNA
ggagttcgggagaacactgc

SEQ ID NO: 1682 - DNA, 20 bp, synthetic construct
  source 1..20: mol_type = other DNA
tattaggcacaagctggccc

SEQ ID NO: 1683 - DNA, 20 bp, synthetic construct
  source 1..20: mol_type = other DNA
tagcatgagatccaacaggc

SEQ ID NO: 1684 - DNA, 20 bp, synthetic construct
  source 1..20: mol_type = other DNA
gtcctattcatggtcaggac

SEQ ID NO: 1685 - DNA, 20 bp, synthetic construct
  source 1..20: mol_type = other DNA
ccgtctgacgtcagaggcac

SEQ ID NO: 1686 - DNA, 20 bp, synthetic construct
  source 1..20: mol_type = other DNA
accagagggttgggagagga

SEQ ID NO: 1687 - DNA, 20 bp, synthetic construct
  source 1..20: mol_type = other DNA
caaattcgcctagcgtgaga

SEQ ID NO: 1688 - DNA, 20 bp, synthetic construct
  source 1..20: mol_type = other DNA
ttagactactgtcaggtaca

SEQ ID NO: 1689 - DNA, 20 bp, synthetic construct
  source 1..20: mol_type = other DNA
accgggatcacatataatcc

SEQ ID NO: 1690 - DNA, 20 bp, synthetic construct
  source 1..20: mol_type = other DNA
tggatcaaccatgtgcagtt

SEQ ID NO: 1691 - DNA, 20 bp, synthetic construct
  source 1..20: mol_type = other DNA
catggtactgtctcctggct

SEQ ID NO: 1692 - DNA, 20 bp, synthetic construct
  source 1..20: mol_type = other DNA
cctgattttccgctcagctc

SEQ ID NO: 1693 - DNA, 20 bp, synthetic construct
  source 1..20: mol_type = other DNA
ggagtggagtatcatgggtg

SEQ ID NO: 1694 - DNA, 20 bp, synthetic construct
  source 1..20: mol_type = other DNA
cggtcccgctcattctggac

SEQ ID NO: 1695 - DNA, 20 bp, synthetic construct
  source 1..20: mol_type = other DNA
ccatatgttcctgcatcagg

SEQ ID NO: 1696 - DNA, 20 bp, synthetic construct
  source 1..20: mol_type = other DNA
aatgccttacgcatgcaaac

SEQ ID NO: 1697 - DNA, 20 bp, synthetic construct
  source 1..20: mol_type = other DNA
tgtgttcgcctcttgacatt

SEQ ID NO: 1698 - DNA, 20 bp, synthetic construct
  source 1..20: mol_type = other DNA
ggttgcatttgatcatgcat

SEQ ID NO: 1699 - DNA, 20 bp, synthetic construct
  source 1..20: mol_type = other DNA
aagataggcgagtctaagag

SEQ ID NO: 1700 - DNA, 20 bp, synthetic construct
  source 1..20: mol_type = other DNA
ttactgcacaggcgttgcca

SEQ ID NO: 1701 - DNA, 20 bp, synthetic construct
  source 1..20: mol_type = other DNA
tggccttgaacaggtcatcc

SEQ ID NO: 1702 - DNA, 20 bp, synthetic construct
  source 1..20: mol_type = other DNA
ggtactcaggaatctccttg

SEQ ID NO: 1703 - DNA, 20 bp, synthetic construct
  source 1..20: mol_type = other DNA
tgcgtacttctccatctgaa

SEQ ID NO: 1704 - DNA, 20 bp, synthetic construct
  source 1..20: mol_type = other DNA
ttctctgtaactttctcggg

SEQ ID NO: 1705 - DNA, 20 bp, synthetic construct
  source 1..20: mol_type = other DNA
attgtgaggtcgccagtctg

SEQ ID NO: 1706 - DNA, 20 bp, synthetic construct
  source 1..20: mol_type = other DNA
tacacagacatagactcctt

SEQ ID NO: 1707 - DNA, 20 bp, synthetic construct
  source 1..20: mol_type = other DNA
gtaacatcagtgacctgcgg

SEQ ID NO: 1708 - DNA, 20 bp, synthetic construct
  source 1..20: mol_type = other DNA
ataaatggctccatctgaga

SEQ ID NO: 1709 - DNA, 20 bp, synthetic construct
  source 1..20: mol_type = other DNA
catcagagttgctctgttcc

SEQ ID NO: 1710 - DNA, 20 bp, synthetic construct
  source 1..20: mol_type = other DNA
ggaaacggagttactgctgc

SEQ ID NO: 1711 - DNA, 20 bp, synthetic construct
  source 1..20: mol_type = other DNA
taccgctcaagtccaaaatc

SEQ ID NO: 1712 - DNA, 20 bp, synthetic construct
  source 1..20: mol_type = other DNA
gagtgaaattcagggtctac

SEQ ID NO: 1713 - DNA, 20 bp, synthetic construct
  source 1..20: mol_type = other DNA
gcaagggttcaaagacccaa

SEQ ID NO: 1714 - DNA, 20 bp, synthetic construct
  source 1..20: mol_type = other DNA
gtaaactaacccttaactgc

SEQ ID NO: 1715 - DNA, 20 bp, synthetic construct
  source 1..20: mol_type = other DNA
caggcccacaggatattcat

SEQ ID NO: 1716 - DNA, 20 bp, synthetic construct
  source 1..20: mol_type = other DNA
cttcagaattcctccatggg

SEQ ID NO: 1717 - DNA, 20 bp, synthetic construct
  source 1..20: mol_type = other DNA
tctataaaagggcacagtct

SEQ ID NO: 1718 - DNA, 20 bp, synthetic construct
  source 1..20: mol_type = other DNA
tccctgtaagtcctttaagg

SEQ ID NO: 1719 - DNA, 20 bp, synthetic construct
  source 1..20: mol_type = other DNA
tccgcgtttgctccgctgtt

SEQ ID NO: 1720 - DNA, 20 bp, synthetic construct
  source 1..20: mol_type = other DNA
catcattatggccttgctgg

SEQ ID NO: 1721 - DNA, 20 bp, synthetic construct
  source 1..20: mol_type = other DNA
tttctgggaccttctttact

SEQ ID NO: 1722 - DNA, 20 bp, synthetic construct
  source 1..20: mol_type = other DNA
tctagctgaaaccgtgggcc

SEQ ID NO: 1723 - DNA, 20 bp, synthetic construct
  source 1..20: mol_type = other DNA
ccaaggtcaggcagtaagtc

SEQ ID NO: 1724 - DNA, 20 bp, synthetic construct
  source 1..20: mol_type = other DNA
gcatgtcagacccagggtgc

SEQ ID NO: 1725 - DNA, 20 bp, synthetic construct
  source 1..20: mol_type = other DNA
ttggagacattctacagaga

SEQ ID NO: 1726 - DNA, 20 bp, synthetic construct
  source 1..20: mol_type = other DNA
gtagtaacagggtacggaac

SEQ ID NO: 1727 - DNA, 20 bp, synthetic construct
  source 1..20: mol_type = other DNA
caaatggcacagatgacatt

SEQ ID NO: 1728 - DNA, 20 bp, synthetic construct
  source 1..20: mol_type = other DNA
gggatgaagtcagctgggtt

SEQ ID NO: 1729 - DNA, 20 bp, synthetic construct
  source 1..20: mol_type = other DNA
ggtattccatcatctcctgc

SEQ ID NO: 1730 - DNA, 20 bp, synthetic construct
  source 1..20: mol_type = other DNA
tgagtacgttttgacacaac

SEQ ID NO: 1731 - DNA, 20 bp, synthetic construct
  source 1..20: mol_type = other DNA
catgagcatgatatggcaga

SEQ ID NO: 1732 - DNA, 20 bp, synthetic construct
  source 1..20: mol_type = other DNA
tctctgcagaagaactcctg

SEQ ID NO: 1733 - DNA, 20 bp, synthetic construct
  source 1..20: mol_type = other DNA
ggcagcattctctttcacaa

SEQ ID NO: 1734 - DNA, 20 bp, synthetic construct
  source 1..20: mol_type = other DNA
atcacgaaaatagagccttc

SEQ ID NO: 1735 - DNA, 20 bp, synthetic construct
  source 1..20: mol_type = other DNA
cacttcttgcttggaggata

SEQ ID NO: 1736 - DNA, 20 bp, synthetic construct
  source 1..20: mol_type = other DNA
gcagcgagcagtccttctga

SEQ ID NO: 1737 - DNA, 20 bp, synthetic construct
  source 1..20: mol_type = other DNA
acacagacatttgaagctgc

SEQ ID NO: 1738 - DNA, 20 bp, synthetic construct
  source 1..20: mol_type = other DNA
cactggcactggaaagaccc

SEQ ID NO: 1739 - DNA, 20 bp, synthetic construct
  source 1..20: mol_type = other DNA
ttcttgtgtcggccgatcag

SEQ ID NO: 1740 - DNA, 20 bp, synthetic construct
  source 1..20: mol_type = other DNA
cctcgataatctcattgccc

SEQ ID NO: 1741 - DNA, 20 bp, synthetic construct
  source 1..20: mol_type = other DNA
gtcccattcgttgtaagaag

SEQ ID NO: 1742 - DNA, 20 bp, synthetic construct
  source 1..20: mol_type = other DNA
gcagctctgagtacaggtcc

SEQ ID NO: 1743 - DNA, 20 bp, synthetic construct
  source 1..20: mol_type = other DNA
ggttcaaaacgaaagcaagt

SEQ ID NO: 1744 - DNA, 20 bp, synthetic construct
  source 1..20: mol_type = other DNA
tttgtcttcctcttcgtcta

SEQ ID NO: 1745 - DNA, 20 bp, synthetic construct
  source 1..20: mol_type = other DNA
cgcaagtgatgcccggcgca

SEQ ID NO: 1746 - DNA, 20 bp, synthetic construct
  source 1..20: mol_type = other DNA
ggccctcattctagttcctt

SEQ ID NO: 1747 - DNA, 20 bp, synthetic construct
  source 1..20: mol_type = other DNA
agagatcctcattatcctga

SEQ ID NO: 1748 - DNA, 20 bp, synthetic construct
  source 1..20: mol_type = other DNA
aaggtcaactgggttgccgg

SEQ ID NO: 1749 - DNA, 20 bp, synthetic construct
  source 1..20: mol_type = other DNA
tcgtagtctaaggtcatgtg

SEQ ID NO: 1750 - DNA, 20 bp, synthetic construct
  source 1..20: mol_type = other DNA
gggccacatcctgtcccacc

SEQ ID NO: 1751 - DNA, 20 bp, synthetic construct
  source 1..20: mol_type = other DNA
ccacggtgccatacagagaa

SEQ ID NO: 1752 - DNA, 20 bp, synthetic construct
  source 1..20: mol_type = other DNA
tgagataaacgcagatactg

SEQ ID NO: 1753 - DNA, 20 bp, synthetic construct
  source 1..20: mol_type = other DNA
ctcaagtcaaggtattcgag

SEQ ID NO: 1754 - DNA, 20 bp, synthetic construct
  source 1..20: mol_type = other DNA
cggaaaagattatgccagca

SEQ ID NO: 1755 - DNA, 20 bp, synthetic construct
  source 1..20: mol_type = other DNA
ccctcttttcttctttactc

SEQ ID NO: 1756 - DNA, 20 bp, synthetic construct
  source 1..20: mol_type = other DNA
acgggttgggagggtggttc

SEQ ID NO: 1757 - DNA, 20 bp, synthetic construct
  source 1..20: mol_type = other DNA
gtcagcagtatgattgtggg

SEQ ID NO: 1758 - DNA, 20 bp, synthetic construct
  source 1..20: mol_type = other DNA
accagcaatcaatcctgtga

SEQ ID NO: 1759 - DNA, 20 bp, synthetic construct
  source 1..20: mol_type = other DNA
tcagaaagagcagcatcgat

SEQ ID NO: 1760 - DNA, 20 bp, synthetic construct
  source 1..20: mol_type = other DNA
gaagggatttgtgcgcatgt

SEQ ID NO: 1761 - DNA, 20 bp, synthetic construct
  source 1..20: mol_type = other DNA
tccttacatcattcacagtc

SEQ ID NO: 1762 - DNA, 20 bp, synthetic construct
  source 1..20: mol_type = other DNA
cactgtatccaggacagcac

SEQ ID NO: 1763 - DNA, 20 bp, synthetic construct
  source 1..20: mol_type = other DNA
ttgtagaatacagggtgtgg

SEQ ID NO: 1764 - DNA, 20 bp, synthetic construct
  source 1..20: mol_type = other DNA
gagcttctggcaattgcagt

SEQ ID NO: 1765 - DNA, 20 bp, synthetic construct
  source 1..20: mol_type = other DNA
gtagacacgttgagcttctg

SEQ ID NO: 1766 - DNA, 20 bp, synthetic construct
  source 1..20: mol_type = other DNA
gattgacataatcagccgat

SEQ ID NO: 1767 - DNA, 20 bp, synthetic construct
  source 1..20: mol_type = other DNA
tgcttggctattgaagattg

SEQ ID NO: 1768 - DNA, 20 bp, synthetic construct
  source 1..20: mol_type = other DNA
tcaactttttcaaccctgtg

SEQ ID NO: 1769 - DNA, 20 bp, synthetic construct
  source 1..20: mol_type = other DNA
gtaatgaaagctggcagagg

SEQ ID NO: 1770 - DNA, 20 bp, synthetic construct
  source 1..20: mol_type = other DNA
aaagccacgttggtgatcat

SEQ ID NO: 1771 - DNA, 20 bp, synthetic construct
  source 1..20: mol_type = other DNA
aagtcaaggcctgtgcagct

SEQ ID NO: 1772 - DNA, 20 bp, synthetic construct
  source 1..20: mol_type = other DNA
cgagtagaaatacggttcat

SEQ ID NO: 1773 - DNA, 20 bp, synthetic construct
  source 1..20: mol_type = other DNA
cattttgcaccgtccagtcc

SEQ ID NO: 1774 - DNA, 20 bp, synthetic construct
  source 1..20: mol_type = other DNA
gccttttcctctgggacaga

SEQ ID NO: 1775 - DNA, 20 bp, synthetic construct
  source 1..20: mol_type = other DNA
caccatatcatacagcagga

SEQ ID NO: 1776 - DNA, 20 bp, synthetic construct
  source 1..20: mol_type = other DNA
cggagttttactaaaggagg

SEQ ID NO: 1777 - DNA, 20 bp, synthetic construct
  source 1..20: mol_type = other DNA
ttccgcagtgtctctggcca

SEQ ID NO: 1778 - DNA, 20 bp, synthetic construct
  source 1..20: mol_type = other DNA
gtggtggttttcaatgaagg

SEQ ID NO: 1779 - DNA, 20 bp, synthetic construct
  source 1..20: mol_type = other DNA
tgttgaagggcacagacatt

SEQ ID NO: 1780 - DNA, 20 bp, synthetic construct
  source 1..20: mol_type = other DNA
atccttcttcagttccggag

SEQ ID NO: 1781 - DNA, 20 bp, synthetic construct
  source 1..20: mol_type = other DNA
gctttatctggtgagacaga

SEQ ID NO: 1782 - DNA, 20 bp, synthetic construct
  source 1..20: mol_type = other DNA
cagggttcttgcatcaagct

SEQ ID NO: 1783 - DNA, 20 bp, synthetic construct
  source 1..20: mol_type = other DNA
ctagctctggactgcttgat

SEQ ID NO: 1784 - DNA, 20 bp, synthetic construct
  source 1..20: mol_type = other DNA
acatccattgtaatctgagc

SEQ ID NO: 1785 - DNA, 20 bp, synthetic construct
  source 1..20: mol_type = other DNA
ttgagtcaaacacatgggaa

SEQ ID NO: 1786 - DNA, 20 bp, synthetic construct
  source 1..20: mol_type = other DNA
aaatgaacccagcctctggc

SEQ ID NO: 1787 - DNA, 20 bp, synthetic construct
  source 1..20: mol_type = other DNA
tgaaacccaccaggcacaca

SEQ ID NO: 1788 - DNA, 20 bp, synthetic construct
  source 1..20: mol_type = other DNA
caggatgatttgaaggtgaa

SEQ ID NO: 1789 - DNA, 20 bp, synthetic construct
  source 1..20: mol_type = other DNA
tggcctcatcataagtcata

SEQ ID NO: 1790 - DNA, 20 bp, synthetic construct
  source 1..20: mol_type = other DNA
gtgcataccaaaacacactt

SEQ ID NO: 1791 - DNA, 20 bp, synthetic construct
  source 1..20: mol_type = other DNA
ttcccgggaacccacttttt

SEQ ID NO: 1792 - DNA, 20 bp, synthetic construct
  source 1..20: mol_type = other DNA
ctagtgtcttcagcctgccg

SEQ ID NO: 1793 - DNA, 20 bp, synthetic construct
  source 1..20: mol_type = other DNA
gagggtactttctcctgagg

SEQ ID NO: 1794 - DNA, 20 bp, synthetic construct
  source 1..20: mol_type = other DNA
tacaatggctggagagttac

SEQ ID NO: 1795 - DNA, 20 bp, synthetic construct
  source 1..20: mol_type = other DNA
tattccaggatcttcttcca

SEQ ID NO: 1796 - DNA, 20 bp, synthetic construct
  source 1..20: mol_type = other DNA
aggttgttgaggttgttgag

SEQ ID NO: 1797 - DNA, 20 bp, synthetic construct
  source 1..20: mol_type = other DNA
gaggcttggttttattgtgc

SEQ ID NO: 1798 - DNA, 20 bp, synthetic construct
  source 1..20: mol_type = other DNA
aagctaatcgtgttcctgga

SEQ ID NO: 1799 - DNA, 20 bp, synthetic construct
  source 1..20: mol_type = other DNA
agcggtaaagacccgcatca

SEQ ID NO: 1800 - DNA, 20 bp, synthetic construct
  source 1..20: mol_type = other DNA
gaaggtgacgttgaatgaaa

SEQ ID NO: 1801 - DNA, 20 bp, synthetic construct
  source 1..20: mol_type = other DNA
gttggatacttgctggaaaa

SEQ ID NO: 1802 - DNA, 20 bp, synthetic construct
  source 1..20: mol_type = other DNA
gttagcaagaaacttctgca

SEQ ID NO: 1803 - DNA, 20 bp, synthetic construct
  source 1..20: mol_type = other DNA
aagatgtgaccaaggtgatt

SEQ ID NO: 1804 - DNA, 20 bp, synthetic construct
  source 1..20: mol_type = other DNA
cactgcttgtctgtactgtc

SEQ ID NO: 1805 - DNA, 20 bp, synthetic construct
  source 1..20: mol_type = other DNA
cacatctgttttggttctct

SEQ ID NO: 1806 - DNA, 20 bp, synthetic construct
  source 1..20: mol_type = other DNA
atagtctgaggattacacct

SEQ ID NO: 1807 - DNA, 20 bp, synthetic construct
  source 1..20: mol_type = other DNA
caaacaccacacagctgtcc

SEQ ID NO: 1808 - DNA, 20 bp, synthetic construct
  source 1..20: mol_type = other DNA
ggttaccctggttttgacag

SEQ ID NO: 1809 - DNA, 20 bp, synthetic construct
  source 1..20: mol_type = other DNA
gagggtgggttctcgggcac

SEQ ID NO: 1810 - DNA, 20 bp, synthetic construct
  source 1..20: mol_type = other DNA
gtagaactgtggttcaagag

SEQ ID NO: 1811 - DNA, 20 bp, synthetic construct
  source 1..20: mol_type = other DNA
cccatttcttctctgggttg

SEQ ID NO: 1812 - DNA, 20 bp, synthetic construct
  source 1..20: mol_type = other DNA
caaagcagcgcctcagaagc

SEQ ID NO: 1813 - DNA, 20 bp, synthetic construct
  source 1..20: mol_type = other DNA
ctccttctttgtcctgaaga

SEQ ID NO: 1814 - DNA, 20 bp, synthetic construct
  source 1..20: mol_type = other DNA
tgtggcctgaaagtagagcc

SEQ ID NO: 1815 - DNA, 20 bp, synthetic construct
  source 1..20: mol_type = other DNA
ccgaagcagagtttttagga

SEQ ID NO: 1816 - DNA, 20 bp, synthetic construct
  source 1..20: mol_type = other DNA
ttgtagtgaagggaaggttt

SEQ ID NO: 1817 - DNA, 20 bp, synthetic construct
  source 1..20: mol_type = other DNA
aagacccaggacttggccgc

SEQ ID NO: 1818 - DNA, 20 bp, synthetic construct
  source 1..20: mol_type = other DNA
cttgttgcgctcaaagttgc

SEQ ID NO: 1819 - DNA, 20 bp, synthetic construct
  source 1..20: mol_type = other DNA
ctctaggttgagaccgccgg

SEQ ID NO: 1820 - DNA, 20 bp, synthetic construct
  source 1..20: mol_type = other DNA
tcgcagagacgtgcaccagc

SEQ ID NO: 1821 - DNA, 20 bp, synthetic construct
  source 1..20: mol_type = other DNA
catgtgtttgttgcctggat

SEQ ID NO: 1822 - DNA, 20 bp, synthetic construct
  source 1..20: mol_type = other DNA
agccatatcggtccagtccc

SEQ ID NO: 1823 - DNA, 20 bp, synthetic construct
  source 1..20: mol_type = other DNA
ttacccacatatctctggcc

SEQ ID NO: 1824 - DNA, 20 bp, synthetic construct
  source 1..20: mol_type = other DNA
tgattgagtagatgacagac

SEQ ID NO: 1825 - DNA, 20 bp, synthetic construct
  source 1..20: mol_type = other DNA
catcacatgtaacttgcaca

SEQ ID NO: 1826 - DNA, 20 bp, synthetic construct
  source 1..20: mol_type = other DNA
tttccatccatggcctgtgc

SEQ ID NO: 1827 - DNA, 20 bp, synthetic construct
  source 1..20: mol_type = other DNA
ttacagcaggagtgaagcca

SEQ ID NO: 1828 - DNA, 20 bp, synthetic construct
  source 1..20: mol_type = other DNA
gttcagaggtgactggatcc

SEQ ID NO: 1829 - DNA, 20 bp, synthetic construct
  source 1..20: mol_type = other DNA
agggattctcaacccgtctt

SEQ ID NO: 1830 - DNA, 20 bp, synthetic construct
  source 1..20: mol_type = other DNA
agcacacgaaagccagggcc

SEQ ID NO: 1831 - DNA, 20 bp, synthetic construct
  source 1..20: mol_type = other DNA
atggtgcagttgcgaacgag

SEQ ID NO: 1832 - DNA, 20 bp, synthetic construct
  source 1..20: mol_type = other DNA
ccatatacaacacagacttc

SEQ ID NO: 1833 - DNA, 20 bp, synthetic construct
  source 1..20: mol_type = other DNA
ctttgcttgactgagatgtg

SEQ ID NO: 1834 - DNA, 20 bp, synthetic construct
  source 1..20: mol_type = other DNA
agatagatgtccagaccttt

SEQ ID NO: 1835 - DNA, 20 bp, synthetic construct
  source 1..20: mol_type = other DNA
accctctgagaaagttttag

SEQ ID NO: 1836 - DNA, 20 bp, synthetic construct
  source 1..20: mol_type = other DNA
ccgacctgtagaggatgtgg

SEQ ID NO: 1837 - DNA, 20 bp, synthetic construct
  source 1..20: mol_type = other DNA
aaggttaaggagcttgtgtg

SEQ ID NO: 1838 - DNA, 20 bp, synthetic construct
  source 1..20: mol_type = other DNA
tggttgaaaggtctgaaaca

SEQ ID NO: 1839 - DNA, 20 bp, synthetic construct
  source 1..20: mol_type = other DNA
gctgaatggccgtttctgga

SEQ ID NO: 1840 - DNA, 20 bp, synthetic construct
  source 1..20: mol_type = other DNA
taaactcccacaaggatgtc

SEQ ID NO: 1841 - DNA, 20 bp, synthetic construct
  source 1..20: mol_type = other DNA
actggctcagatctcagatg

SEQ ID NO: 1842 - DNA, 20 bp, synthetic construct
  source 1..20: mol_type = other DNA
tctataggtatcttgaaggg

SEQ ID NO: 1843 - DNA, 20 bp, synthetic construct
  source 1..20: mol_type = other DNA
agttggtaatggctgcttct

SEQ ID NO: 1844 - DNA, 20 bp, synthetic construct
  source 1..20: mol_type = other DNA
ggcatgtcaatattactgtg

SEQ ID NO: 1845 - DNA, 20 bp, synthetic construct
  source 1..20: mol_type = other DNA
gaatacaggtcccgctggcc

SEQ ID NO: 1846 - DNA, 20 bp, synthetic construct
  source 1..20: mol_type = other DNA
cgaagcacctggttgcaatt

SEQ ID NO: 1847 - DNA, 20 bp, synthetic construct
  source 1..20: mol_type = other DNA
actgcaggtagatacaatag

SEQ ID NO: 1848 - DNA, 20 bp, synthetic construct
  source 1..20: mol_type = other DNA
cctgtccaaatcttccacca

SEQ ID NO: 1849 - DNA, 20 bp, synthetic construct
  source 1..20: mol_type = other DNA
tcagagctttctccatctgg

SEQ ID NO: 1850 - DNA, 20 bp, synthetic construct
  source 1..20: mol_type = other DNA
cttatccatcttcaaagagg

SEQ ID NO: 1851 - DNA, 20 bp, synthetic construct
  source 1..20: mol_type = other DNA
gctccatcaaaggtgtaaat

SEQ ID NO: 1852 - DNA, 20 bp, synthetic construct
  source 1..20: mol_type = other DNA
gtcgtgcttaaatgaagaga

SEQ ID NO: 1853 - DNA, 20 bp, synthetic construct
  source 1..20: mol_type = other DNA
aaattctctgagatggaccc

SEQ ID NO: 1854 - DNA, 20 bp, synthetic construct
  source 1..20: mol_type = other DNA
acacgagctgagttaatggg

SEQ ID NO: 1855 - DNA, 20 bp, synthetic construct
  source 1..20: mol_type = other DNA
tggaagtgaaagctacaaag

SEQ ID NO: 1856 - DNA, 20 bp, synthetic construct
  source 1..20: mol_type = other DNA
gaagtgagctgagacactgg

SEQ ID NO: 1857 - DNA, 20 bp, synthetic construct
  source 1..20: mol_type = other DNA
agccaggatcacaatggaga

SEQ ID NO: 1858 - DNA, 20 bp, synthetic construct
  source 1..20: mol_type = other DNA
ccaattgctcacgtagaaga

SEQ ID NO: 1859 - DNA, 20 bp, synthetic construct
  source 1..20: mol_type = other DNA
gtcagtttccagaatacaga

SEQ ID NO: 1860 - DNA, 20 bp, synthetic construct
  source 1..20: mol_type = other DNA
aaaaggttgcccaggaactt

SEQ ID NO: 1861 - DNA, 20 bp, synthetic construct
  source 1..20: mol_type = other DNA
gttggagactcaagcacctc

SEQ ID NO: 1862 - DNA, 20 bp, synthetic construct
  source 1..20: mol_type = other DNA
cgcacaacagtattgtgacc

SEQ ID NO: 1863 - DNA, 20 bp, synthetic construct
  source 1..20: mol_type = other DNA
gtctgactctaaaagagacc

SEQ ID NO: 1864 - DNA, 20 bp, synthetic construct
  source 1..20: mol_type = other DNA
caatatttcatctgaagggc

SEQ ID NO: 1865 - DNA, 20 bp, synthetic construct
  source 1..20: mol_type = other DNA
cctctcttgttggatgagtt

SEQ ID NO: 1866 - DNA, 20 bp, synthetic construct
  source 1..20: mol_type = other DNA
atcgaggttgagggtcagga

SEQ ID NO: 1867 - DNA, 20 bp, synthetic construct
  source 1..20: mol_type = other DNA
acgttacgcgctgccacgtc

SEQ ID NO: 1868 - DNA, 20 bp, synthetic construct
  source 1..20: mol_type = other DNA
cggtgggtacatgagctcca

SEQ ID NO: 1869 - DNA, 20 bp, synthetic construct
  source 1..20: mol_type = other DNA
tttgtaagaattgggcccat

SEQ ID NO: 1870 - DNA, 20 bp, synthetic construct
  source 1..20: mol_type = other DNA
atgtactggaaagccgttgt

SEQ ID NO: 1871 - DNA, 20 bp, synthetic construct
  source 1..20: mol_type = other DNA
aatctagagcagttgtaagg

SEQ ID NO: 1872 - DNA, 20 bp, synthetic construct
  source 1..20: mol_type = other DNA
gccgccatttcgagttaggg

SEQ ID NO: 1873 - DNA, 20 bp, synthetic construct
  source 1..20: mol_type = other DNA
attgggcccactcccaccct

SEQ ID NO: 1874 - DNA, 20 bp, synthetic construct
  source 1..20: mol_type = other DNA
tcaagtgaggcaatcctgga

SEQ ID NO: 1875 - DNA, 20 bp, synthetic construct
  source 1..20: mol_type = other DNA
ggttaaggaatcaaagtcag

SEQ ID NO: 1876 - DNA, 20 bp, synthetic construct
  source 1..20: mol_type = other DNA
tgaggatcccaaagaccacc

SEQ ID NO: 1877 - DNA, 20 bp, synthetic construct
  source 1..20: mol_type = other DNA
atgtccacaccgccgatgag

SEQ ID NO: 1878 - DNA, 20 bp, synthetic construct
  source 1..20: mol_type = other DNA
gtactccttcccttcttggc

SEQ ID NO: 1879 - DNA, 20 bp, synthetic construct
  source 1..20: mol_type = other DNA
atctctcggtacgtggagtt

SEQ ID NO: 1880 - DNA, 20 bp, synthetic construct
  source 1..20: mol_type = other DNA
gccctatcctatattggcac

SEQ ID NO: 1881 - DNA, 20 bp, synthetic construct
  source 1..20: mol_type = other DNA
atcctggcacgtggcggctg

SEQ ID NO: 1882 - DNA, 20 bp, synthetic construct
  source 1..20: mol_type = other DNA
taagagcatagacactcact

SEQ ID NO: 1883 - DNA, 20 bp, synthetic construct
  source 1..20: mol_type = other DNA
gcgacgactctgcaattctg

SEQ ID NO: 1884 - DNA, 20 bp, synthetic construct
  source 1..20: mol_type = other DNA
acaaagcatgtaggcctaga

SEQ ID NO: 1885 - DNA, 20 bp, synthetic construct
  source 1..20: mol_type = other DNA
ctcatcacgcaggtgggctc

SEQ ID NO: 1886 - DNA, 20 bp, synthetic construct
  source 1..20: mol_type = other DNA
aggaagcgaggagccggcag

SEQ ID NO: 1887 - DNA, 20 bp, synthetic construct
  source 1..20: mol_type = other DNA
actatcctggccgtgctgtg

SEQ ID NO: 1888 - DNA, 20 bp, synthetic construct
  source 1..20: mol_type = other DNA
ctccttttggtgtattcgtt

SEQ ID NO: 1889 - DNA, 20 bp, synthetic construct
  source 1..20: mol_type = other DNA
gtcttgaatgaggagttact

SEQ ID NO: 1890 - DNA, 20 bp, synthetic construct
  source 1..20: mol_type = other DNA
tcaggaagccaccgcacctc

SEQ ID NO: 1891 - DNA, 20 bp, synthetic construct
  source 1..20: mol_type = other DNA
cagtgtggttgctaaagtgc

SEQ ID NO: 1892 - DNA, 20 bp, synthetic construct
  source 1..20: mol_type = other DNA
gtgcgcctaaaaccacagtg

SEQ ID NO: 1893 - DNA, 20 bp, synthetic construct
  source 1..20: mol_type = other DNA
ggaagacacctttacagatc

SEQ ID NO: 1894 - DNA, 20 bp, synthetic construct
  source 1..20: mol_type = other DNA
atccggcagcagtagatccc

SEQ ID NO: 1895 - DNA, 20 bp, synthetic construct
  source 1..20: mol_type = other DNA
aatgcacttcgtttttccct

SEQ ID NO: 1896 - DNA, 20 bp, synthetic construct
  source 1..20: mol_type = other DNA
gtccaaattcttcaagccgc

SEQ ID NO: 1897 - DNA, 20 bp, synthetic construct
  source 1..20: mol_type = other DNA
aatcctagcacagggactcc

SEQ ID NO: 1898 - DNA, 20 bp, synthetic construct
  source 1..20: mol_type = other DNA
tacacgggcgagttcagcac

SEQ ID NO: 1899 - DNA, 20 bp, synthetic construct
  source 1..20: mol_type = other DNA
agatcaggcagatgtttagc

SEQ ID NO: 1900 - DNA, 20 bp, synthetic construct
  source 1..20: mol_type = other DNA
aagagaacccaaaacgatgc

SEQ ID NO: 1901 - DNA, 20 bp, synthetic construct
  source 1..20: mol_type = other DNA
tcacatagccttgcctaatt

SEQ ID NO: 1902 - DNA, 20 bp, synthetic construct
  source 1..20: mol_type = other DNA
tcccgtctttgtatctcagg

SEQ ID NO: 1903 - DNA, 20 bp, synthetic construct
  source 1..20: mol_type = other DNA
gggtggctctcggagatgtt

SEQ ID NO: 1904 - DNA, 20 bp, synthetic construct
  source 1..20: mol_type = other DNA
tgtgagagcacacaactgga

SEQ ID NO: 1905 - DNA, 20 bp, synthetic construct
  source 1..20: mol_type = other DNA
agtcagagctagaatttcgg

SEQ ID NO: 1906 - DNA, 20 bp, synthetic construct
  source 1..20: mol_type = other DNA
ggatctctaggttcacactg

SEQ ID NO: 1907 - DNA, 20 bp, synthetic construct
  source 1..20: mol_type = other DNA
cctctctgagctgggtgttc

SEQ ID NO: 1908 - DNA, 20 bp, synthetic construct
  source 1..20: mol_type = other DNA
ggcatctcggagatctcgaa

SEQ ID NO: 1909 - DNA, 20 bp, synthetic construct
  source 1..20: mol_type = other DNA
agtcaaaccttccttcttgg

SEQ ID NO: 1910 - DNA, 20 bp, synthetic construct
  source 1..20: mol_type = other DNA
gaagagctgagtttgctaaa

SEQ ID NO: 1911 - DNA, 20 bp, synthetic construct
  source 1..20: mol_type = other DNA
agtgatcgtacaggtgcatc

SEQ ID NO: 1912 - DNA, 20 bp, synthetic construct
  source 1..20: mol_type = other DNA
tgcttcagacacctgtgtaa

SEQ ID NO: 1913 - DNA, 20 bp, synthetic construct
  source 1..20: mol_type = other DNA
attttgcagacgctctcagc

SEQ ID NO: 1914 - DNA, 20 bp, synthetic construct
  source 1..20: mol_type = other DNA
ggcttcttaccaagaaattc

SEQ ID NO: 1915 - DNA, 20 bp, synthetic construct
  source 1..20: mol_type = other DNA
caactgtggtcagtttctga

SEQ ID NO: 1916 - DNA, 20 bp, synthetic construct
  source 1..20: mol_type = other DNA
aaatggtcagcagccctctc

SEQ ID NO: 1917 - DNA, 20 bp, synthetic construct
  source 1..20: mol_type = other DNA
cccatgctacatttgccgaa

SEQ ID NO: 1918 - DNA, 20 bp, synthetic construct
  source 1..20: mol_type = other DNA
gtgtttatcgctccctctcc

SEQ ID NO: 1919 - DNA, 20 bp, synthetic construct
  source 1..20: mol_type = other DNA
taacttggactccattcact

SEQ ID NO: 1920 - DNA, 20 bp, synthetic construct
  source 1..20: mol_type = other DNA
actgaactcaggaagagtgg

SEQ ID NO: 1921 - DNA, 20 bp, synthetic construct
  source 1..20: mol_type = other DNA
tctgcatctctagccagggt

SEQ ID NO: 1922 - DNA, 20 bp, synthetic construct
  source 1..20: mol_type = other DNA
caagaacaccaggctgatgg

SEQ ID NO: 1923 - DNA, 20 bp, synthetic construct
  source 1..20: mol_type = other DNA
aatggcgttcccaccagaga

SEQ ID NO: 1924 - DNA, 20 bp, synthetic construct
  source 1..20: mol_type = other DNA
acctagagaagttgctaagg

SEQ ID NO: 1925 - DNA, 20 bp, synthetic construct
  source 1..20: mol_type = other DNA
gaggtcatcaagcatggagt

SEQ ID NO: 1926 - DNA, 20 bp, synthetic construct
  source 1..20: mol_type = other DNA
tgttcacgaacggcagcacg

SEQ ID NO: 1927 - DNA, 20 bp, synthetic construct
  source 1..20: mol_type = other DNA
tgtcataagtgtagcaggtc

SEQ ID NO: 1928 - DNA, 20 bp, synthetic construct
  source 1..20: mol_type = other DNA
tattgtgggctctgggaatc

SEQ ID NO: 1929 - DNA, 20 bp, synthetic construct
  source 1..20: mol_type = other DNA
atatagatccactgctggtg

SEQ ID NO: 1930 - DNA, 20 bp, synthetic construct
  source 1..20: mol_type = other DNA
ggcactattaggtagtacca

SEQ ID NO: 1931 - DNA, 20 bp, synthetic construct
  source 1..20: mol_type = other DNA
cgggaagagacaggtcagct

SEQ ID NO: 1932 - DNA, 20 bp, synthetic construct
  source 1..20: mol_type = other DNA
tatccctaaggtcccagaaa

SEQ ID NO: 1933 - DNA, 20 bp, synthetic construct
  source 1..20: mol_type = other DNA
tcaaggaggtaaagttaagc

SEQ ID NO: 1934 - DNA, 20 bp, synthetic construct
  source 1..20: mol_type = other DNA
ggcatttctgatgtgactca

SEQ ID NO: 1935 - DNA, 20 bp, synthetic construct
  source 1..20: mol_type = other DNA
caatatagtctccacacagc

SEQ ID NO: 1936 - DNA, 20 bp, synthetic construct
  source 1..20: mol_type = other DNA
ctaaggcagaaaatcgtctt

SEQ ID NO: 1937 - DNA, 20 bp, synthetic construct
  source 1..20: mol_type = other DNA
tgtgtggaagagaaagcaaa

SEQ ID NO: 1938 - DNA, 20 bp, synthetic construct
  source 1..20: mol_type = other DNA
ataggtaccttggttaggac

SEQ ID NO: 1939 - DNA, 20 bp, synthetic construct
  source 1..20: mol_type = other DNA
tgtctgtggttccatagatc

SEQ ID NO: 1940 - DNA, 20 bp, synthetic construct
  source 1..20: mol_type = other DNA
gtccgtttttgatggcactc

SEQ ID NO: 1941 - DNA, 20 bp, synthetic construct
  source 1..20: mol_type = other DNA
gttaaggcagagacatgtcc

SEQ ID NO: 1942 - DNA, 20 bp, synthetic construct
  source 1..20: mol_type = other DNA
gcccaccagtgaagacatcc

SEQ ID NO: 1943 - DNA, 20 bp, synthetic construct
  source 1..20: mol_type = other DNA
acctggtcgatggatggtga

SEQ ID NO: 1944 - DNA, 20 bp, synthetic construct
  source 1..20: mol_type = other DNA
ggagcctgatctctggtttc

SEQ ID NO: 1945 - DNA, 20 bp, synthetic construct
  source 1..20: mol_type = other DNA
gctggatcttccctccttga

SEQ ID NO: 1946 - DNA, 20 bp, synthetic construct
  source 1..20: mol_type = other DNA
acctgcagcaaaggctgcgg

SEQ ID NO: 1947 - DNA, 20 bp, synthetic construct
  source 1..20: mol_type = other DNA
tttggccaggatacttctgc

SEQ ID NO: 1948 - DNA, 20 bp, synthetic construct
  source 1..20: mol_type = other DNA
tcatatcaggtcaccctggc

SEQ ID NO: 1949 - DNA, 20 bp, synthetic construct
  source 1..20: mol_type = other DNA
gaagtcacgcccgttgggca

SEQ ID NO: 1950 - DNA, 20 bp, synthetic construct
  source 1..20: mol_type = other DNA
ctgatcctctgccaccaccg

SEQ ID NO: 1951 - DNA, 20 bp, synthetic construct
  source 1..20: mol_type = other DNA
ggagcaccagcttctctgca

SEQ ID NO: 1952 - DNA, 20 bp, synthetic construct
  source 1..20: mol_type = other DNA
tcagcgggaaggactttatg

SEQ ID NO: 1953 - DNA, 20 bp, synthetic construct
  source 1..20: mol_type = other DNA
attcagctggtcgatatcac

SEQ ID NO: 1954 - DNA, 20 bp, synthetic construct
  source 1..20: mol_type = other DNA
cattgtcactgatgtcaaac

SEQ ID NO: 1955 - DNA, 20 bp, synthetic construct
  source 1..20: mol_type = other DNA
tcgtacttgatcttgccgtt

SEQ ID NO: 1956 - DNA, 20 bp, synthetic construct
  source 1..20: mol_type = other DNA
ggctgcgcttgcactctgag

SEQ ID NO: 1957 - DNA, 20 bp, synthetic construct
  source 1..20: mol_type = other DNA
aatacgaagacagccctggc

SEQ ID NO: 1958 - DNA, 20 bp, synthetic construct
  source 1..20: mol_type = other DNA
aactgggtaattccatgttc

SEQ ID NO: 1959 - DNA, 20 bp, synthetic construct
  source 1..20: mol_type = other DNA
gtttacgctgtctagccaga

SEQ ID NO: 1960 - DNA, 20 bp, synthetic construct
  source 1..20: mol_type = other DNA
aggcgtcatcgttccatttg

SEQ ID NO: 1961 - DNA, 20 bp, synthetic construct
  source 1..20: mol_type = other DNA
ccattacttcactggagtta

SEQ ID NO: 1962 - DNA, 20 bp, synthetic construct
  source 1..20: mol_type = other DNA
gatgatgaagcggcccagga

SEQ ID NO: 1963 - DNA, 20 bp, synthetic construct
  source 1..20: mol_type = other DNA
gcggtcccataacacttgtt

SEQ ID NO: 1964 - DNA, 20 bp, synthetic construct
  source 1..20: mol_type = other DNA
gtctaacatcactgtgctct

SEQ ID NO: 1965 - DNA, 20 bp, synthetic construct
  source 1..20: mol_type = other DNA
gttgagattctgctaatgac

SEQ ID NO: 1966 - DNA, 20 bp, synthetic construct
  source 1..20: mol_type = other DNA
ccacgaccaacgtacgatga

SEQ ID NO: 1967 - DNA, 20 bp, synthetic construct
  source 1..20: mol_type = other DNA
tggctctgttgaatcacttc

SEQ ID NO: 1968 - DNA, 20 bp, synthetic construct
  source 1..20: mol_type = other DNA
tcccactttcagcagcatac

SEQ ID NO: 1969 - DNA, 20 bp, synthetic construct
  source 1..20: mol_type = other DNA
gagttaagtttcgagtgaag

SEQ ID NO: 1970 - DNA, 20 bp, synthetic construct
  source 1..20: mol_type = other DNA
catgtctccgcaacccggct

SEQ ID NO: 1971 - DNA, 20 bp, synthetic construct
  source 1..20: mol_type = other DNA
cctcatagctgtggtcccgg

SEQ ID NO: 1972 - DNA, 20 bp, synthetic construct
  source 1..20: mol_type = other DNA
tcaaggatagaagctgattc

SEQ ID NO: 1973 - DNA, 20 bp, synthetic construct
  source 1..20: mol_type = other DNA
ccgaggcacaggtatagctg

SEQ ID NO: 1974 - DNA, 20 bp, synthetic construct
  source 1..20: mol_type = other DNA
gcgaaagccctcaatttccc

SEQ ID NO: 1975 - DNA, 20 bp, synthetic construct
  source 1..20: mol_type = other DNA
tggtgactgaatgagttcat

SEQ ID NO: 1976 - DNA, 20 bp, synthetic construct
  source 1..20: mol_type = other DNA
tttctaacatctataggccc

SEQ ID NO: 1977 - DNA, 20 bp, synthetic construct
  source 1..20: mol_type = other DNA
caaccttgcttcacattctc

SEQ ID NO: 1978 - DNA, 20 bp, synthetic construct
  source 1..20: mol_type = other DNA
cggtacatccacgtagtttt

SEQ ID NO: 1979 - DNA, 20 bp, synthetic construct
  source 1..20: mol_type = other DNA
tctctccggttttttccaat

SEQ ID NO: 1980 - DNA, 20 bp, synthetic construct
  source 1..20: mol_type = other DNA
cagaaaaagtaaagggcaga

SEQ ID NO: 1981 - DNA, 20 bp, synthetic construct
  source 1..20: mol_type = other DNA
aaagaaaggccatcatctag

SEQ ID NO: 1982 - DNA, 20 bp, synthetic construct
  source 1..20: mol_type = other DNA
tcgttttcgtggtgacaaga

SEQ ID NO: 1983 - DNA, 20 bp, synthetic construct
  source 1..20: mol_type = other DNA
tacgtaagcagagagccgga

SEQ ID NO: 1984 - DNA, 20 bp, synthetic construct
  source 1..20: mol_type = other DNA
ttcacacatgctgcatcctg

SEQ ID NO: 1985 - DNA, 20 bp, synthetic construct
  source 1..20: mol_type = other DNA
tgttatgactccaggattgt

SEQ ID NO: 1986 - DNA, 20 bp, synthetic construct
  source 1..20: mol_type = other DNA
atcagttgcaagcagtcttg

SEQ ID NO: 1987 - DNA, 20 bp, synthetic construct
  source 1..20: mol_type = other DNA
gacatacttcaggatgccaa

SEQ ID NO: 1988 - DNA, 20 bp, synthetic construct
  source 1..20: mol_type = other DNA
ggcgtattccatgacgagag

SEQ ID NO: 1989 - DNA, 20 bp, synthetic construct
  source 1..20: mol_type = other DNA
agttggtcaccaaatcagca

SEQ ID NO: 1990 - DNA, 20 bp, synthetic construct
  source 1..20: mol_type = other DNA
ctccaatctgagcagcaatc

SEQ ID NO: 1991 - DNA, 20 bp, synthetic construct
  source 1..20: mol_type = other DNA
tgcaaaatagagcacgagaa

SEQ ID NO: 1992 - DNA, 20 bp, synthetic construct
  source 1..20: mol_type = other DNA
tcgatctcatcagggtactc

SEQ ID NO: 1993 - DNA, 20 bp, synthetic construct
  source 1..20: mol_type = other DNA
gctcggtgatttagcagcaa

SEQ ID NO: 1994 - DNA, 20 bp, synthetic construct
  source 1..20: mol_type = other DNA
cacatttgtcagtctggtgg

SEQ ID NO: 1995 - DNA, 20 bp, synthetic construct
  source 1..20: mol_type = other DNA
ccaggattcactgggatcag

SEQ ID NO: 1996 - DNA, 20 bp, synthetic construct
  source 1..20: mol_type = other DNA
ggttcagtacagagatgccc

SEQ ID NO: 1997 - DNA, 20 bp, synthetic construct
  source 1..20: mol_type = other DNA
tgacgtttccatggctggtg

SEQ ID NO: 1998 - DNA, 20 bp, synthetic construct
  source 1..20: mol_type = other DNA
ggagacctgcagtagtagcc

SEQ ID NO: 1999 - DNA, 20 bp, synthetic construct
  source 1..20: mol_type = other DNA
catggaggctgcaaagtgat

SEQ ID NO: 2000 - DNA, 20 bp, synthetic construct
  source 1..20: mol_type = other DNA
ttagcaacttgggacagtga

SEQ ID NO: 2001 - DNA, 20 bp, synthetic construct
  source 1..20: mol_type = other DNA
gtcctgcctcaaccattaat

SEQ ID NO: 2002 - DNA, 20 bp, synthetic construct
  source 1..20: mol_type = other DNA
acgctgaccacgtcatacaa

SEQ ID NO: 2003 - DNA, 20 bp, synthetic construct
  source 1..20: mol_type = other DNA
ggcaagcgcagctgagctcc

SEQ ID NO: 2004 - DNA, 20 bp, synthetic construct
  source 1..20: mol_type = other DNA
gtcttctgtgtgaaggccag

SEQ ID NO: 2005 - DNA, 20 bp, synthetic construct
  source 1..20: mol_type = other DNA
aacaacctcattcctcatgt

SEQ ID NO: 2006 - DNA, 20 bp, synthetic construct
  source 1..20: mol_type = other DNA
tagaagcctttgaccaggca

SEQ ID NO: 2007 - DNA, 20 bp, synthetic construct
  source 1..20: mol_type = other DNA
ctacagcgatgaagcagcag

SEQ ID NO: 2008 - DNA, 20 bp, synthetic construct
  source 1..20: mol_type = other DNA
taagataatcatggcccact

SEQ ID NO: 2009 - DNA, 20 bp, synthetic construct
  source 1..20: mol_type = other DNA
agaaaaccttctctgcagct

SEQ ID NO: 2010 - DNA, 20 bp, synthetic construct
  source 1..20: mol_type = other DNA
gctcagccgtgagttcagct

SEQ ID NO: 2011 - DNA, 20 bp, synthetic construct
  source 1..20: mol_type = other DNA
aagaagatgccgtgcatgtc

SEQ ID NO: 2012 - DNA, 20 bp, synthetic construct
  source 1..20: mol_type = other DNA
aggacaacagcagatactcc

SEQ ID NO: 2013 - DNA, 20 bp, synthetic construct
  source 1..20: mol_type = other DNA
gggcacacacagctcttctc

SEQ ID NO: 2014 - DNA, 20 bp, synthetic construct
  source 1..20: mol_type = other DNA
gtaccttatccctcttctac

SEQ ID NO: 2015 - DNA, 20 bp, synthetic construct
  source 1..20: mol_type = other DNA
cagacatctcttctcaccct

SEQ ID NO: 2016 - DNA, 20 bp, synthetic construct
  source 1..20: mol_type = other DNA
aaccagcctttcttaaggta

SEQ ID NO: 2017 - DNA, 20 bp, synthetic construct
  source 1..20: mol_type = other DNA
tatagccatgcccttcacac

SEQ ID NO: 2018 - DNA, 20 bp, synthetic construct
  source 1..20: mol_type = other DNA
gggcaagatttgaattcgat

SEQ ID NO: 2019 - DNA, 20 bp, synthetic construct
  source 1..20: mol_type = other DNA
gagatgaacttcattctgtc

SEQ ID NO: 2020 - DNA, 20 bp, synthetic construct
  source 1..20: mol_type = other DNA
ccgttccctttcttcatggg

SEQ ID NO: 2021 - DNA, 20 bp, synthetic construct
  source 1..20: mol_type = other DNA
gttttaccacgtgcttctta

SEQ ID NO: 2022 - DNA, 20 bp, synthetic construct
  source 1..20: mol_type = other DNA
cgtgatcccatcggcccagg

SEQ ID NO: 2023 - DNA, 20 bp, synthetic construct
  source 1..20: mol_type = other DNA
agcacttggtggtcactcac

SEQ ID NO: 2024 - DNA, 20 bp, synthetic construct
  source 1..20: mol_type = other DNA
atgcaatagcaggacaggat

SEQ ID NO: 2025 - DNA, 20 bp, synthetic construct
  source 1..20: mol_type = other DNA
cccactcctgaaaactgaaa

SEQ ID NO: 2026 - DNA, 20 bp, synthetic construct
  source 1..20: mol_type = other DNA
agtcttttgtcccagtttgg

SEQ ID NO: 2027 - DNA, 20 bp, synthetic construct
  source 1..20: mol_type = other DNA
gcgaagagaatctctggcaa

SEQ ID NO: 2028 - DNA, 20 bp, synthetic construct
  source 1..20: mol_type = other DNA
tttccattgatgtgagaccc

SEQ ID NO: 2029 - DNA, 20 bp, synthetic construct
  source 1..20: mol_type = other DNA
attctaccatcagagcctca

SEQ ID NO: 2030 - DNA, 20 bp, synthetic construct
  source 1..20: mol_type = other DNA
cgtctcggaatttgcggcag

SEQ ID NO: 2031 - DNA, 20 bp, synthetic construct
  source 1..20: mol_type = other DNA
ccggcaagagacgcagtccc

SEQ ID NO: 2032 - DNA, 20 bp, synthetic construct
  source 1..20: mol_type = other DNA
attgatcgccgggcgactat

SEQ ID NO: 2033 - DNA, 20 bp, synthetic construct
  source 1..20: mol_type = other DNA
gcgaccaaagaacgagaaaa

SEQ ID NO: 2034 - DNA, 20 bp, synthetic construct
  source 1..20: mol_type = other DNA
cgagtagacgggatctgctg

SEQ ID NO: 2035 - DNA, 20 bp, synthetic construct
  source 1..20: mol_type = other DNA
ctacgctcgaagtttggtta

SEQ ID NO: 2036 - DNA, 20 bp, synthetic construct
  source 1..20: mol_type = other DNA
tactgacttggactggtacg

SEQ ID NO: 2037 - DNA, 20 bp, synthetic construct
  source 1..20: mol_type = other DNA
atcgtgttatggacgatgac

SEQ ID NO: 2038 - DNA, 20 bp, synthetic construct
  source 1..20: mol_type = other DNA
gctgagggaattaggaggcg

SEQ ID NO: 2039 - DNA, 20 bp, synthetic construct
  source 1..20: mol_type = other DNA
gatttgtccatgctcaccag

SEQ ID NO: 2040 - DNA, 20 bp, synthetic construct
  source 1..20: mol_type = other DNA
cgttgtcaccacttccttca

SEQ ID NO: 2041 - DNA, 20 bp, synthetic construct
  source 1..20: mol_type = other DNA
attcctaagatggaggatag

SEQ ID NO: 2042 - DNA, 20 bp, synthetic construct
  source 1..20: mol_type = other DNA
tacaagtggtacgtactcta

SEQ ID NO: 2043 - DNA, 20 bp, synthetic construct
  source 1..20: mol_type = other DNA
ttgcagttggtgctgtaaac

SEQ ID NO: 2044 - DNA, 20 bp, synthetic construct
  source 1..20: mol_type = other DNA
tacttgttttccgaccacgg

SEQ ID NO: 2045 - DNA, 20 bp, synthetic construct
  source 1..20: mol_type = other DNA
ggtgatattgtgtctctggt

SEQ ID NO: 2046 - DNA, 20 bp, synthetic construct
  source 1..20: mol_type = other DNA
tacctagttgttcttccatc

SEQ ID NO: 2047 - DNA, 20 bp, synthetic construct
  source 1..20: mol_type = other DNA
attaggtgggagttttcgcc

SEQ ID NO: 2048 - DNA, 20 bp, synthetic construct
  source 1..20: mol_type = other DNA
acgaccctttctaaagtggg

SEQ ID NO: 2049 - DNA, 20 bp, synthetic construct
  source 1..20: mol_type = other DNA
catcgtggcacccggcaggt

SEQ ID NO: 2050 - DNA, 20 bp, synthetic construct
  source 1..20: mol_type = other DNA
gcaggttccctcttccctca

SEQ ID NO: 2051 - DNA, 20 bp, synthetic construct
  source 1..20: mol_type = other DNA
tctgtgtcccttcatgcatg

SEQ ID NO: 2052 - DNA, 20 bp, synthetic construct
  source 1..20: mol_type = other DNA
cctcccttccactctggtct

SEQ ID NO: 2053 - DNA, 20 bp, synthetic construct
  source 1..20: mol_type = other DNA
ccagtgaaagtgaaactgaa

SEQ ID NO: 2054 - DNA, 20 bp, synthetic construct
  source 1..20: mol_type = other DNA
cccgaagattcattatttgg

SEQ ID NO: 2055 - DNA, 20 bp, synthetic construct
  source 1..20: mol_type = other DNA
ctgctcggtgtagacaccca

SEQ ID NO: 2056 - DNA, 20 bp, synthetic construct
  source 1..20: mol_type = other DNA
ttcctgtacgtggactcaga

SEQ ID NO: 2057 - DNA, 20 bp, synthetic construct
  source 1..20: mol_type = other DNA
cgacggccaaaatccatcca

SEQ ID NO: 2058 - DNA, 20 bp, synthetic construct
  source 1..20: mol_type = other DNA
aagacagcagtcaaagttgc

SEQ ID NO: 2059 - DNA, 20 bp, synthetic construct
  source 1..20: mol_type = other DNA
gtgctacaaagaagctgtgc

SEQ ID NO: 2060 - DNA, 20 bp, synthetic construct
  source 1..20: mol_type = other DNA
cgttgaccattcaaaccttc

SEQ ID NO: 2061 - DNA, 20 bp, synthetic construct
  source 1..20: mol_type = other DNA
gatcgaagagatctgttcta

SEQ ID NO: 2062 - DNA, 20 bp, synthetic construct
  source 1..20: mol_type = other DNA
cttgagggatcgtcagcatc

SEQ ID NO: 2063 - DNA, 20 bp, synthetic construct
  source 1..20: mol_type = other DNA
atatagttcgaggttctggt

SEQ ID NO: 2064 - DNA, 20 bp, synthetic construct
  source 1..20: mol_type = other DNA
tcactgctacgtgtagaatg

SEQ ID NO: 2065 - DNA, 20 bp, synthetic construct
  source 1..20: mol_type = other DNA
atatttgtctttcgtcctgg

SEQ ID NO: 2066 - DNA, 20 bp, synthetic construct
  source 1..20: mol_type = other DNA
gatttggtgagatgctatga

SEQ ID NO: 2067 - DNA, 20 bp, synthetic construct
  source 1..20: mol_type = other DNA
caaggtgcttagaccctgat

SEQ ID NO: 2068 - DNA, 20 bp, synthetic construct
  source 1..20: mol_type = other DNA
tgtttatcagaagctggttc

SEQ ID NO: 2069 - DNA, 20 bp, synthetic construct
  source 1..20: mol_type = other DNA
gtgtgttgctggatgttccc

SEQ ID NO: 2070 - DNA, 20 bp, synthetic construct
  source 1..20: mol_type = other DNA
acacttattacctgccagat

SEQ ID NO: 2071 - DNA, 20 bp, synthetic construct
  source 1..20: mol_type = other DNA
tgtgttcagagaaggaatcg

SEQ ID NO: 2072 - DNA, 20 bp, synthetic construct
  source 1..20: mol_type = other DNA
actagatctgtggcaatcat

SEQ ID NO: 2073 - DNA, 20 bp, synthetic construct
  source 1..20: mol_type = other DNA
aaaatgttgaggtggcatct

SEQ ID NO: 2074 - DNA, 20 bp, synthetic construct
  source 1..20: mol_type = other DNA
ggagcatttgggacatcaga

SEQ ID NO: 2075 - DNA, 20 bp, synthetic construct
  source 1..20: mol_type = other DNA
gagtagactcagcaaccaga

SEQ ID NO: 2076 - DNA, 20 bp, synthetic construct
  source 1..20: mol_type = other DNA
ttcatctctacctgggagtg

SEQ ID NO: 2077 - DNA, 20 bp, synthetic construct
  source 1..20: mol_type = other DNA
acctccggatgctgttcggc

SEQ ID NO: 2078 - DNA, 20 bp, synthetic construct
  source 1..20: mol_type = other DNA
cttgaacgattctattgcca

SEQ ID NO: 2079 - DNA, 20 bp, synthetic construct
  source 1..20: mol_type = other DNA
ggcaacccggactcccgaag

SEQ ID NO: 2080 - DNA, 20 bp, synthetic construct
  source 1..20: mol_type = other DNA
ggtgttggccgaccaggaca

SEQ ID NO: 2081 - DNA, 20 bp, synthetic construct
  source 1..20: mol_type = other DNA
cggctaatgaagcacagggc

SEQ ID NO: 2082 - DNA, 20 bp, synthetic construct
  source 1..20: mol_type = other DNA
ggatgatgttgtgggccgtc

SEQ ID NO: 2083 - DNA, 20 bp, synthetic construct
  source 1..20: mol_type = other DNA
ggtctccataaatttagggt

SEQ ID NO: 2084 - DNA, 20 bp, synthetic construct
  source 1..20: mol_type = other DNA
accagtcctaaacctctcca

SEQ ID NO: 2085 - DNA, 20 bp, synthetic construct
  source 1..20: mol_type = other DNA
ggtataatgtggtgaggaga

SEQ ID NO: 2086 - DNA, 20 bp, synthetic construct
  source 1..20: mol_type = other DNA
ccaagaagtctgtggtgaag

SEQ ID NO: 2087 - DNA, 20 bp, synthetic construct
  source 1..20: mol_type = other DNA
atgtggttccgataacactg

SEQ ID NO: 2088 - DNA, 20 bp, synthetic construct
  source 1..20: mol_type = other DNA
gcaggtccacagtaagtttc

SEQ ID NO: 2089 - DNA, 20 bp, synthetic construct
  source 1..20: mol_type = other DNA
acatcctccaagatgtgatt

SEQ ID NO: 2090 - DNA, 20 bp, synthetic construct
  source 1..20: mol_type = other DNA
cattcgagaacctgcttcgg

SEQ ID NO: 2091 - DNA, 20 bp, synthetic construct
  source 1..20: mol_type = other DNA
tgggtatcctgatgtgcacg

SEQ ID NO: 2092 - DNA, 20 bp, synthetic construct
  source 1..20: mol_type = other DNA
ctctgagctcgagtcattgc

SEQ ID NO: 2093 - DNA, 20 bp, synthetic construct
  source 1..20: mol_type = other DNA
gtgatgctccgatcagaaaa

SEQ ID NO: 2094 - DNA, 20 bp, synthetic construct
  source 1..20: mol_type = other DNA
tgatggctttataaagggct

SEQ ID NO: 2095 - DNA, 20 bp, synthetic construct
  source 1..20: mol_type = other DNA
gttggtcactttcttgtttc

SEQ ID NO: 2096 - DNA, 20 bp, synthetic construct
  source 1..20: mol_type = other DNA
attctcccacttcatgaggc

SEQ ID NO: 2097 - DNA, 20 bp, synthetic construct
  source 1..20: mol_type = other DNA
ggtgtcatgacagcaggatg

SEQ ID NO: 2098 - DNA, 20 bp, synthetic construct
  source 1..20: mol_type = other DNA
agccattcatttctgccttc

SEQ ID NO: 2099 - DNA, 20 bp, synthetic construct
  source 1..20: mol_type = other DNA
cgctcgccgaaggactagcg

SEQ ID NO: 2100 - DNA, 20 bp, synthetic construct
  source 1..20: mol_type = other DNA
cgcgcacggagatgagcgac

SEQ ID NO: 2101 - DNA, 20 bp, synthetic construct
  source 1..20: mol_type = other DNA
cacggtagaagttattgtgg

SEQ ID NO: 2102 - DNA, 20 bp, synthetic construct
  source 1..20: mol_type = other DNA
cggaggaaaggttggcaatg

SEQ ID NO: 2103 - DNA, 20 bp, synthetic construct
  source 1..20: mol_type = other DNA
tgagttcggtcacagacttg

SEQ ID NO: 2104 - DNA, 20 bp, synthetic construct
  source 1..20: mol_type = other DNA
cctgtcatgtaatacaagcc

SEQ ID NO: 2105 - DNA, 20 bp, synthetic construct
  source 1..20: mol_type = other DNA
caggtggagaaattgtccta

SEQ ID NO: 2106 - DNA, 20 bp, synthetic construct
  source 1..20: mol_type = other DNA
gatctcattcctaatggtcc

SEQ ID NO: 2107 - DNA, 20 bp, synthetic construct
  source 1..20: mol_type = other DNA
tccaagaagaaccggaacta

SEQ ID NO: 2108 - DNA, 20 bp, synthetic construct
  source 1..20: mol_type = other DNA
gattgagtatgagcagctgc

SEQ ID NO: 2109 - DNA, 20 bp, synthetic construct
  source 1..20: mol_type = other DNA
gggatcaccgggccgttgtc

SEQ ID NO: 2110 - DNA, 20 bp, synthetic construct
  source 1..20: mol_type = other DNA
gcccgaagcggtggcacttc

SEQ ID NO: 2111 - DNA, 20 bp, synthetic construct
  source 1..20: mol_type = other DNA
tacgcctccgcgtcacgaag

SEQ ID NO: 2112 - DNA, 20 bp, synthetic construct
  source 1..20: mol_type = other DNA
tttgggtggatctttgggaa

SEQ ID NO: 2113 - DNA, 20 bp, synthetic construct
  source 1..20: mol_type = other DNA
gaatctgcatcagttgggcc

SEQ ID NO: 2114 - DNA, 20 bp, synthetic construct
  source 1..20: mol_type = other DNA
cattggagattccaggaggg

SEQ ID NO: 2115 - DNA, 20 bp, synthetic construct
  source 1..20: mol_type = other DNA
tccatactgctgttgtcacc

SEQ ID NO: 2116 - DNA, 20 bp, synthetic construct
  source 1..20: mol_type = other DNA
ggtatcgacctgatattgtt

SEQ ID NO: 2117 - DNA, 20 bp, synthetic construct
  source 1..20: mol_type = other DNA
cctctttgcacaagctacag

SEQ ID NO: 2118 - DNA, 20 bp, synthetic construct
  source 1..20: mol_type = other DNA
tctgcacagatttgctctcc

SEQ ID NO: 2119 - DNA, 20 bp, synthetic construct
  source 1..20: mol_type = other DNA
ggatactgtttttgaaggct

SEQ ID NO: 2120 - DNA, 20 bp, synthetic construct
  source 1..20: mol_type = other DNA
ctcttggcgatgttgaattc

SEQ ID NO: 2121 - DNA, 20 bp, synthetic construct
  source 1..20: mol_type = other DNA
tgaggcacatcatactgttc

SEQ ID NO: 2122 - DNA, 20 bp, synthetic construct
  source 1..20: mol_type = other DNA
ctgattgaactgtgtctcca

SEQ ID NO: 2123 - DNA, 20 bp, synthetic construct
  source 1..20: mol_type = other DNA
ttatatcgagaggctgcttc

SEQ ID NO: 2124 - DNA, 20 bp, synthetic construct
  source 1..20: mol_type = other DNA
gtggtagttgtcgatgtaaa

SEQ ID NO: 2125 - DNA, 20 bp, synthetic construct
  source 1..20: mol_type = other DNA
tcaggacacagcagataagc

SEQ ID NO: 2126 - DNA, 20 bp, synthetic construct
  source 1..20: mol_type = other DNA
gcaggtgcttgttcacgcag

SEQ ID NO: 2127 - DNA, 20 bp, synthetic construct
  source 1..20: mol_type = other DNA
ctttcaggcagttctcgttg

SEQ ID NO: 2128 - DNA, 20 bp, synthetic construct
  source 1..20: mol_type = other DNA
atgagcttcgggattggctg

SEQ ID NO: 2129 - DNA, 20 bp, synthetic construct
  source 1..20: mol_type = other DNA
aatctgcttagtggcagatg

SEQ ID NO: 2130 - DNA, 20 bp, synthetic construct
  source 1..20: mol_type = other DNA
cgtctcaatttaaaacgctc

SEQ ID NO: 2131 - DNA, 20 bp, synthetic construct
  source 1..20: mol_type = other DNA
gcagcagtagtacccaaagg

SEQ ID NO: 2132 - DNA, 20 bp, synthetic construct
  source 1..20: mol_type = other DNA
gcttgctcagtgccaactcg

SEQ ID NO: 2133 - DNA, 20 bp, synthetic construct
  source 1..20: mol_type = other DNA
ggtcttcagtgcaaagagga

SEQ ID NO: 2134 - DNA, 20 bp, synthetic construct
  source 1..20: mol_type = other DNA
atcaatgggttgaagttgag

SEQ ID NO: 2135 - DNA, 20 bp, synthetic construct
  source 1..20: mol_type = other DNA
tttgctgtagtactttgagc

SEQ ID NO: 2136 - DNA, 20 bp, synthetic construct
  source 1..20: mol_type = other DNA
gcaacatagtatctgccggg

SEQ ID NO: 2137 - DNA, 20 bp, synthetic construct
  source 1..20: mol_type = other DNA
ccacctcagatgtttcttta

SEQ ID NO: 2138 - DNA, 20 bp, synthetic construct
  source 1..20: mol_type = other DNA
aattccaagcgttccactct

SEQ ID NO: 2139 - DNA, 20 bp, synthetic construct
  source 1..20: mol_type = other DNA
ggagctccagatattaatct

SEQ ID NO: 2140 - DNA, 20 bp, synthetic construct
  source 1..20: mol_type = other DNA
ttgacttcatcaagcccagg

SEQ ID NO: 2141 - DNA, 20 bp, synthetic construct
  source 1..20: mol_type = other DNA
gcactgaaagtggccgagga

SEQ ID NO: 2142 - DNA, 20 bp, synthetic construct
  source 1..20: mol_type = other DNA
cgaaactgaggctggctgta

SEQ ID NO: 2143 - DNA, 20 bp, synthetic construct
  source 1..20: mol_type = other DNA
cacagcgtcccttaaattct

SEQ ID NO: 2144 - DNA, 20 bp, synthetic construct
  source 1..20: mol_type = other DNA
caatctatctccacgggaca

SEQ ID NO: 2145 - DNA, 20 bp, synthetic construct
  source 1..20: mol_type = other DNA
gtacaggagatgtggtgagt

SEQ ID NO: 2146 - DNA, 20 bp, synthetic construct
  source 1..20: mol_type = other DNA
gcccgcatacctttctcgtt

SEQ ID NO: 2147 - DNA, 20 bp, synthetic construct
  source 1..20: mol_type = other DNA
tccaacagctgtgatgtcat

SEQ ID NO: 2148 - DNA, 20 bp, synthetic construct
  source 1..20: mol_type = other DNA
ggcgtcgctatcctcttcct

SEQ ID NO: 2149 - DNA, 20 bp, synthetic construct
  source 1..20: mol_type = other DNA
gtgctattagcaggtgggtg

SEQ ID NO: 2150 - DNA, 20 bp, synthetic construct
  source 1..20: mol_type = other DNA
gaaaccggttttttgagctc

SEQ ID NO: 2151 - DNA, 20 bp, synthetic construct
  source 1..20: mol_type = other DNA
atatacaggtactttgccac

SEQ ID NO: 2152 - DNA, 20 bp, synthetic construct
  source 1..20: mol_type = other DNA
ataggaagacgctgagttac

SEQ ID NO: 2153 - DNA, 20 bp, synthetic construct
  source 1..20: mol_type = other DNA
ctagaatcctagttactctc

SEQ ID NO: 2154 - DNA, 20 bp, synthetic construct
  source 1..20: mol_type = other DNA
ctcaggccgcgctttctccc

SEQ ID NO: 2155 - DNA, 20 bp, synthetic construct
  source 1..20: mol_type = other DNA
gtgacggatggtggtactgt

SEQ ID NO: 2156 - DNA, 20 bp, synthetic construct
  source 1..20: mol_type = other DNA
ttcattactctccatctccc

SEQ ID NO: 2157 - DNA, 20 bp, synthetic construct
  source 1..20: mol_type = other DNA
agcaattggacttgtggtaa

SEQ ID NO: 2158 - DNA, 20 bp, synthetic construct
  source 1..20: mol_type = other DNA
ggatgtccatgtgcttctca

SEQ ID NO: 2159 - DNA, 20 bp, synthetic construct
  source 1..20: mol_type = other DNA
gcaaggatcatgggtcactt

SEQ ID NO: 2160 - DNA, 20 bp, synthetic construct
  source 1..20: mol_type = other DNA
agggagagttaacgaccctt

SEQ ID NO: 2161 - DNA, 20 bp, synthetic construct
  source 1..20: mol_type = other DNA
attccaacttccgcctgtac

SEQ ID NO: 2162 - DNA, 20 bp, synthetic construct
  source 1..20: mol_type = other DNA
cacaggataaaaacacaacc

SEQ ID NO: 2163 - DNA, 20 bp, synthetic construct
  source 1..20: mol_type = other DNA
ggacaagctcccgggcttgg

SEQ ID NO: 2164 - DNA, 20 bp, synthetic construct
  source 1..20: mol_type = other DNA
ggaccctgcaaacagctcct

SEQ ID NO: 2165 - DNA, 20 bp, synthetic construct
  source 1..20: mol_type = other DNA
gcatccttgtcttttccact

SEQ ID NO: 2166 - DNA, 20 bp, synthetic construct
  source 1..20: mol_type = other DNA
tgggttgattttcagcccaa

SEQ ID NO: 2167 - DNA, 20 bp, synthetic construct
  source 1..20: mol_type = other DNA
gtgagaggatcctttgctgt

SEQ ID NO: 2168 - DNA, 20 bp, synthetic construct
  source 1..20: mol_type = other DNA
agtgtaacgctatcctccag

SEQ ID NO: 2169 - DNA, 20 bp, synthetic construct
  source 1..20: mol_type = other DNA
cgttatatgcgcggatcgca

SEQ ID NO: 2170 - DNA, 20 bp, synthetic construct
  source 1..20: mol_type = other DNA
caccagcaagcatgccgagc

SEQ ID NO: 2171 - DNA, 20 bp, synthetic construct
  source 1..20: mol_type = other DNA
aacccatccacgccagcttg

SEQ ID NO: 2172 - DNA, 20 bp, synthetic construct
  source 1..20: mol_type = other DNA
cctcggtgaagacgatgaag

SEQ ID NO: 2173 - DNA, 20 bp, synthetic construct
  source 1..20: mol_type = other DNA
ggtgcacatgtacaggacgc

SEQ ID NO: 2174 - DNA, 20 bp, synthetic construct
  source 1..20: mol_type = other DNA
gaagacacgcgtgaaaggac

SEQ ID NO: 2175 - DNA, 20 bp, synthetic construct
  source 1..20: mol_type = other DNA
acacagaataaagaaggtcc

SEQ ID NO: 2176 - DNA, 20 bp, synthetic construct
  source 1..20: mol_type = other DNA
atgtctccactggagttttt

SEQ ID NO: 2177 - DNA, 20 bp, synthetic construct
  source 1..20: mol_type = other DNA
acaccaacgacagtttgaaa

SEQ ID NO: 2178 - DNA, 20 bp, synthetic construct
  source 1..20: mol_type = other DNA
tggtacaagtgacgacgttc

SEQ ID NO: 2179 - DNA, 20 bp, synthetic construct
  source 1..20: mol_type = other DNA
cccttgctcaagcagagccc

SEQ ID NO: 2180 - DNA, 20 bp, synthetic construct
  source 1..20: mol_type = other DNA
atgagaatcttctgcagcca

SEQ ID NO: 2181 - DNA, 20 bp, synthetic construct
  source 1..20: mol_type = other DNA
agatgtgcacttctccagtt

SEQ ID NO: 2182 - DNA, 20 bp, synthetic construct
  source 1..20: mol_type = other DNA
atggtgaaaacctgttgtcc

SEQ ID NO: 2183 - DNA, 20 bp, synthetic construct
  source 1..20: mol_type = other DNA
tgattcccaccacttggagc

SEQ ID NO: 2184 - DNA, 20 bp, synthetic construct
  source 1..20: mol_type = other DNA
tgttcctaggctttcctgtg

SEQ ID NO: 2185 - DNA, 20 bp, synthetic construct
  source 1..20: mol_type = other DNA
tgtggttgtagggacagttg

SEQ ID NO: 2186 - DNA, 20 bp, synthetic construct
  source 1..20: mol_type = other DNA
tttccagcctatgtgacgag

SEQ ID NO: 2187 - DNA, 20 bp, synthetic construct
  source 1..20: mol_type = other DNA
acgaagttcctgcagttcat

SEQ ID NO: 2188 - DNA, 20 bp, synthetic construct
  source 1..20: mol_type = other DNA
aggcctcatactcaggagaa

SEQ ID NO: 2189 - DNA, 20 bp, synthetic construct
  source 1..20: mol_type = other DNA
gggacaaaatcttcatcatc

SEQ ID NO: 2190 - DNA, 20 bp, synthetic construct
  source 1..20: mol_type = other DNA
gcgattcttggttttggcag

SEQ ID NO: 2191 - DNA, 20 bp, synthetic construct
  source 1..20: mol_type = other DNA
actaggttcagccaaaagcg

SEQ ID NO: 2192 - DNA, 20 bp, synthetic construct
  source 1..20: mol_type = other DNA
accactcttcttgacctttc

SEQ ID NO: 2193 - DNA, 20 bp, synthetic construct
  source 1..20: mol_type = other DNA
ctcgtgcatgtggtagtgat

SEQ ID NO: 2194 - DNA, 20 bp, synthetic construct
  source 1..20: mol_type = other DNA
ttccagttccgagattgcag

SEQ ID NO: 2195 - DNA, 20 bp, synthetic construct
  source 1..20: mol_type = other DNA
catgtgttcagggttggcct

SEQ ID NO: 2196 - DNA, 20 bp, synthetic construct
  source 1..20: mol_type = other DNA
ctagagaagtcatgatgggc

SEQ ID NO: 2197 - DNA, 20 bp, synthetic construct
  source 1..20: mol_type = other DNA
tgacatgtcaggtcaaatgg

SEQ ID NO: 2198 - DNA, 20 bp, synthetic construct
  source 1..20: mol_type = other DNA
gaggatgaagaattctcgct

SEQ ID NO: 2199 - DNA, 20 bp, synthetic construct
  source 1..20: mol_type = other DNA
cattttcagtggactcgacc

SEQ ID NO: 2200 - DNA, 20 bp, synthetic construct
  source 1..20: mol_type = other DNA
gcttgactctgtgacttcaa

SEQ ID NO: 2201 - DNA, 20 bp, synthetic construct
  source 1..20: mol_type = other DNA
gcctgttgctgtggtcctgg

SEQ ID NO: 2202 - DNA, 20 bp, synthetic construct
  source 1..20: mol_type = other DNA
gcccttaacttacacagctt

SEQ ID NO: 2203 - DNA, 20 bp, synthetic construct
  source 1..20: mol_type = other DNA
gggttttcgtgcgggagtct

SEQ ID NO: 2204 - DNA, 20 bp, synthetic construct
  source 1..20: mol_type = other DNA
tccgaggatggattgaaggt

SEQ ID NO: 2205 - DNA, 20 bp, synthetic construct
  source 1..20: mol_type = other DNA
cttaaagctagtgtgtgctc

SEQ ID NO: 2206 - DNA, 20 bp, synthetic construct
  source 1..20: mol_type = other DNA
gtatttccgaagacagcgca

SEQ ID NO: 2207 - DNA, 20 bp, synthetic construct
  source 1..20: mol_type = other DNA
tatatatgtggcatggccaa

SEQ ID NO: 2208 - DNA, 20 bp, synthetic construct
  source 1..20: mol_type = other DNA
tttgacagaactgtcaggtt

SEQ ID NO: 2209 - DNA, 20 bp, synthetic construct
  source 1..20: mol_type = other DNA
ggatattgctattcacagtc

SEQ ID NO: 2210 - DNA, 20 bp, synthetic construct
  source 1..20: mol_type = other DNA
tcgttcactatggtatctgc

SEQ ID NO: 2211 - DNA, 20 bp, synthetic construct
  source 1..20: mol_type = other DNA
gagcgtcgaggcgcagcaca

SEQ ID NO: 2212 - DNA, 20 bp, synthetic construct
  source 1..20: mol_type = other DNA
tcgggactaacataagccaa

SEQ ID NO: 2213 - DNA, 20 bp, synthetic construct
  source 1..20: mol_type = other DNA
tttttctgaagctgccacct

SEQ ID NO: 2214 - DNA, 20 bp, synthetic construct
  source 1..20: mol_type = other DNA
tgccatcattctgtgaaggc

SEQ ID NO: 2215 - DNA, 20 bp, synthetic construct
  source 1..20: mol_type = other DNA
gcacattagacaaagcagtc

SEQ ID NO: 2216 - DNA, 20 bp, synthetic construct
  source 1..20: mol_type = other DNA
ttttagggtagttacgctgc

SEQ ID NO: 2217 - DNA, 20 bp, synthetic construct
  source 1..20: mol_type = other DNA
catttatgaaaccaagaccc

SEQ ID NO: 2218 - DNA, 20 bp, synthetic construct
  source 1..20: mol_type = other DNA
ccagtcactcttgaggtact

SEQ ID NO: 2219 - DNA, 20 bp, synthetic construct
  source 1..20: mol_type = other DNA
gaaggaaatggcgttatacg

SEQ ID NO: 2220 - DNA, 20 bp, synthetic construct
  source 1..20: mol_type = other DNA
agtattgagattccgatcga

SEQ ID NO: 2221 - DNA, 20 bp, synthetic construct
  source 1..20: mol_type = other DNA
gacatgctggtcgctccatc

SEQ ID NO: 2222 - DNA, 20 bp, synthetic construct
  source 1..20: mol_type = other DNA
gattcctccctgacacattg

SEQ ID NO: 2223 - DNA, 20 bp, synthetic construct
  source 1..20: mol_type = other DNA
tattgcaccgcgaatgatga

SEQ ID NO: 2224 - DNA, 20 bp, synthetic construct
  source 1..20: mol_type = other DNA
cggacaggatgtatgctgtg

SEQ ID NO: 2225 - DNA, 20 bp, synthetic construct
  source 1..20: mol_type = other DNA
agcgcgatccctccctccgt

SEQ ID NO: 2226 - DNA, 20 bp, synthetic construct
  source 1..20: mol_type = other DNA
cccattttcttcctctttca

SEQ ID NO: 2227 - DNA, 20 bp, synthetic construct
  source 1..20: mol_type = other DNA
gggagtgaatggagcaatgg

SEQ ID NO: 2228 - DNA, 20 bp, synthetic construct
  source 1..20: mol_type = other DNA
ttataaatctctgccatggc

SEQ ID NO: 2229 - DNA, 20 bp, synthetic construct
  source 1..20: mol_type = other DNA
cttggcctatcttgacccgg

SEQ ID NO: 2230 - DNA, 20 bp, synthetic construct
  source 1..20: mol_type = other DNA
gcatattggagctgggataa

SEQ ID NO: 2231 - DNA, 20 bp, synthetic construct
  source 1..20: mol_type = other DNA
acttgatgagctgagaggta

SEQ ID NO: 2232 - DNA, 20 bp, synthetic construct
  source 1..20: mol_type = other DNA
acatctgtcacttcaggttt

SEQ ID NO: 2233 - DNA, 20 bp, synthetic construct
  source 1..20: mol_type = other DNA
tgtaacatgggctggagttc

SEQ ID NO: 2234 - DNA, 20 bp, synthetic construct
  source 1..20: mol_type = other DNA
atacctgggaataatccacc

SEQ ID NO: 2235 - DNA, 20 bp, synthetic construct
  source 1..20: mol_type = other DNA
gaatgttggtgattgtgagg

SEQ ID NO: 2236 - DNA, 20 bp, synthetic construct
  source 1..20: mol_type = other DNA
gacgtccaacacagcagaga

SEQ ID NO: 2237 - DNA, 20 bp, synthetic construct
  source 1..20: mol_type = other DNA
taaagggcactcaacagggc

SEQ ID NO: 2238 - DNA, 20 bp, synthetic construct
  source 1..20: mol_type = other DNA
aatggcttcttgctcgtgta

SEQ ID NO: 2239 - DNA, 20 bp, synthetic construct
  source 1..20: mol_type = other DNA
acagcaactgcatcttcaga

SEQ ID NO: 2240 - DNA, 20 bp, synthetic construct
  source 1..20: mol_type = other DNA
ctgttccgtcccagtagatt

SEQ ID NO: 2241 - DNA, 20 bp, synthetic construct
  source 1..20: mol_type = other DNA
tactaaggttcaccaagagg

SEQ ID NO: 2242 - DNA, 20 bp, synthetic construct
  source 1..20: mol_type = other DNA
aattcaggttgacaggtggg

SEQ ID NO: 2243 - DNA, 20 bp, synthetic construct
  source 1..20: mol_type = other DNA
cacctgagggtaaagcctac

SEQ ID NO: 2244 - DNA, 20 bp, synthetic construct
  source 1..20: mol_type = other DNA
acataggcaccttctccagg

SEQ ID NO: 2245 - DNA, 20 bp, synthetic construct
  source 1..20: mol_type = other DNA
gtagctgatctttctcttct

SEQ ID NO: 2246 - DNA, 20 bp, synthetic construct
  source 1..20: mol_type = other DNA
agccgtctggttctgtactg

SEQ ID NO: 2247 - DNA, 20 bp, synthetic construct
  source 1..20: mol_type = other DNA
ggtgatgattcattttccct

SEQ ID NO: 2248 - DNA, 20 bp, synthetic construct
  source 1..20: mol_type = other DNA
tttaactgacaggtccaagt

SEQ ID NO: 2249 - DNA, 20 bp, synthetic construct
  source 1..20: mol_type = other DNA
atggctaagtgcacagtggt

SEQ ID NO: 2250 - DNA, 20 bp, synthetic construct
  source 1..20: mol_type = other DNA
caactacctggctgtctgtc

SEQ ID NO: 2251 - DNA, 20 bp, synthetic construct
  source 1..20: mol_type = other DNA
cacaaacacgctggcaggga

SEQ ID NO: 2252 - DNA, 20 bp, synthetic construct
  source 1..20: mol_type = other DNA
caagagtttgttcttcagcc

SEQ ID NO: 2253 - DNA, 20 bp, synthetic construct
  source 1..20: mol_type = other DNA
gaagatggcaccattgggct

SEQ ID NO: 2254 - DNA, 20 bp, synthetic construct
  source 1..20: mol_type = other DNA
tgacattggtcactgatacc

SEQ ID NO: 2255 - DNA, 20 bp, synthetic construct
  source 1..20: mol_type = other DNA
gacatggagattgggaaaag

SEQ ID NO: 2256 - DNA, 20 bp, synthetic construct
  source 1..20: mol_type = other DNA
cgcgcgcgctggttagtgag

SEQ ID NO: 2257 - DNA, 20 bp, synthetic construct
  source 1..20: mol_type = other DNA
cctttcaggagacttctggg

SEQ ID NO: 2258 - DNA, 20 bp, synthetic construct
  source 1..20: mol_type = other DNA
cttcatggtccaggcgtgcc

SEQ ID NO: 2259 - DNA, 20 bp, synthetic construct
  source 1..20: mol_type = other DNA
aatccaggagagtttgccag

SEQ ID NO: 2260 - DNA, 20 bp, synthetic construct
  source 1..20: mol_type = other DNA
gctgatgtcatctgttatgt

SEQ ID NO: 2261 - DNA, 20 bp, synthetic construct
  source 1..20: mol_type = other DNA
tgcaatccatcccgaaggtg

SEQ ID NO: 2262 - DNA, 20 bp, synthetic construct
  source 1..20: mol_type = other DNA
ccatgaatctctctgtgtag

SEQ ID NO: 2263 - DNA, 20 bp, synthetic construct
  source 1..20: mol_type = other DNA
gggcactgatactcaaacac

SEQ ID NO: 2264 - DNA, 20 bp, synthetic construct
  source 1..20: mol_type = other DNA
agctgccaaccatgttgata

SEQ ID NO: 2265 - DNA, 20 bp, synthetic construct
  source 1..20: mol_type = other DNA
tgatgacgatgtgcttcagc

SEQ ID NO: 2266 - DNA, 20 bp, synthetic construct
  source 1..20: mol_type = other DNA
ttggatgacatccagagtgg

SEQ ID NO: 2267 - DNA, 20 bp, synthetic construct
  source 1..20: mol_type = other DNA
tgtcttctacagagtggatg

SEQ ID NO: 2268 - DNA, 20 bp, synthetic construct
  source 1..20: mol_type = other DNA
cagaacttgtcggtgatgag

SEQ ID NO: 2269 - DNA, 20 bp, synthetic construct
  source 1..20: mol_type = other DNA
aattacccttccataggaca

SEQ ID NO: 2270 - DNA, 20 bp, synthetic construct
  source 1..20: mol_type = other DNA
acgtctgagatgcacacagc

SEQ ID NO: 2271 - DNA, 20 bp, synthetic construct
  source 1..20: mol_type = other DNA
ccagaactcgggagccggtt

SEQ ID NO: 2272 - DNA, 20 bp, synthetic construct
  source 1..20: mol_type = other DNA
tttttactccagggttccaa

SEQ ID NO: 2273 - DNA, 20 bp, synthetic construct
  source 1..20: mol_type = other DNA
tgggcagcagtctggagggt

SEQ ID NO: 2274 - DNA, 20 bp, synthetic construct
  source 1..20: mol_type = other DNA
ctcacagctgtaggccattt

SEQ ID NO: 2275 - DNA, 20 bp, synthetic construct
  source 1..20: mol_type = other DNA
ctctcatacattcctgttac

SEQ ID NO: 2276 - DNA, 20 bp, synthetic construct
  source 1..20: mol_type = other DNA
agtctgaccagctaaagtat

SEQ ID NO: 2277 - DNA, 20 bp, synthetic construct
  source 1..20: mol_type = other DNA
acatttggctccacacatag

SEQ ID NO: 2278 - DNA, 20 bp, synthetic construct
  source 1..20: mol_type = other DNA
aaataggcctgcctttcatc

SEQ ID NO: 2279 - DNA, 20 bp, synthetic construct
  source 1..20: mol_type = other DNA
ggtggactttcttctttggt

SEQ ID NO: 2280 - DNA, 20 bp, synthetic construct
  source 1..20: mol_type = other DNA
aagggtggactttcttcttt

SEQ ID NO: 2281 - DNA, 20 bp, synthetic construct
  source 1..20: mol_type = other DNA
agcacacccgggctggatcg

SEQ ID NO: 2282 - DNA, 20 bp, synthetic construct
  source 1..20: mol_type = other DNA
aatgtaggactggtccgtca

SEQ ID NO: 2283 - DNA, 20 bp, synthetic construct
  source 1..20: mol_type = other DNA
tcgacaactagagccatgtt

SEQ ID NO: 2284 - DNA, 20 bp, synthetic construct
  source 1..20: mol_type = other DNA
tcggcaaattcgtaagcagc

SEQ ID NO: 2285 - DNA, 20 bp, synthetic construct
  source 1..20: mol_type = other DNA
cccatcattcttcaggttgt

SEQ ID NO: 2286 - DNA, 20 bp, synthetic construct
  source 1..20: mol_type = other DNA
taccgttggtttcttaagtg

SEQ ID NO: 2287 - DNA, 20 bp, synthetic construct
  source 1..20: mol_type = other DNA
ccattttggcacggatgccg

SEQ ID NO: 2288 - DNA, 20 bp, synthetic construct
  source 1..20: mol_type = other DNA
catggccaccctgcaggtgc

SEQ ID NO: 2289 - DNA, 20 bp, synthetic construct
  source 1..20: mol_type = other DNA
tttaccctatgtaaggcaag

SEQ ID NO: 2290 - DNA, 20 bp, synthetic construct
  source 1..20: mol_type = other DNA
ttttgtccacaaagaggaac

SEQ ID NO: 2291 - DNA, 20 bp, synthetic construct
  source 1..20: mol_type = other DNA
gatgtcatctgtcccaacat

SEQ ID NO: 2292 - DNA, 20 bp, synthetic construct
  source 1..20: mol_type = other DNA
gatgcttgtgaatgcctcaa

SEQ ID NO: 2293 - DNA, 20 bp, synthetic construct
  source 1..20: mol_type = other DNA
tgggatctccacttcattct

SEQ ID NO: 2294 - DNA, 20 bp, synthetic construct
  source 1..20: mol_type = other DNA
tgccttcaagctcattctct

SEQ ID NO: 2295 - DNA, 20 bp, synthetic construct
  source 1..20: mol_type = other DNA
gcatcagaatccacctccct

SEQ ID NO: 2296 - DNA, 20 bp, synthetic construct
  source 1..20: mol_type = other DNA
cggcagtatagaggacggag

SEQ ID NO: 2297 - DNA, 20 bp, synthetic construct
  source 1..20: mol_type = other DNA
cagttaggatcaatgcttcc

SEQ ID NO: 2298 - DNA, 20 bp, synthetic construct
  source 1..20: mol_type = other DNA
ggtagattctgaggtctgca

SEQ ID NO: 2299 - DNA, 20 bp, synthetic construct
  source 1..20: mol_type = other DNA
gtagcgatggtagcggatcc

SEQ ID NO: 2300 - DNA, 20 bp, synthetic construct
  source 1..20: mol_type = other DNA
gttctggatttcttcgaagg

SEQ ID NO: 2301 - DNA, 20 bp, synthetic construct
  source 1..20: mol_type = other DNA
gaacgctgatgctgtttctg

SEQ ID NO: 2302 - DNA, 20 bp, synthetic construct
  source 1..20: mol_type = other DNA
ccagcatcaaaagagtgact

SEQ ID NO: 2303 - DNA, 20 bp, synthetic construct
  source 1..20: mol_type = other DNA
tttgcctccgatggtttcca

SEQ ID NO: 2304 - DNA, 20 bp, synthetic construct
  source 1..20: mol_type = other DNA
gagcttccaaggaaagccaa

SEQ ID NO: 2305 - DNA, 20 bp, synthetic construct
  source 1..20: mol_type = other DNA
catacactgattatccaggt

SEQ ID NO: 2306 - DNA, 20 bp, synthetic construct
  source 1..20: mol_type = other DNA
ctccaatggagcaacagttt

SEQ ID NO: 2307 - DNA, 20 bp, synthetic construct
  source 1..20: mol_type = other DNA
catggcttagtttgattctg

SEQ ID NO: 2308 - DNA, 20 bp, synthetic construct
  source 1..20: mol_type = other DNA
ccaatctgcttcatgccaat

SEQ ID NO: 2309 - DNA, 20 bp, synthetic construct
  source 1..20: mol_type = other DNA
ggtcatgcgattctgtgctg

SEQ ID NO: 2310 - DNA, 20 bp, synthetic construct
  source 1..20: mol_type = other DNA
ctccaggagaatttcagcca

SEQ ID NO: 2311 - DNA, 20 bp, synthetic construct
  source 1..20: mol_type = other DNA
tcccgaccatagattaggga

SEQ ID NO: 2312 - DNA, 20 bp, synthetic construct
  source 1..20: mol_type = other DNA
cagacccacacattgttgac

SEQ ID NO: 2313 - DNA, 20 bp, synthetic construct
  source 1..20: mol_type = other DNA
cgaacccattggctggattt

SEQ ID NO: 2314 - DNA, 20 bp, synthetic construct
  source 1..20: mol_type = other DNA
taaagccgaccgtggagtca

SEQ ID NO: 2315 - DNA, 20 bp, synthetic construct
  source 1..20: mol_type = other DNA
tccaacgatgtttaaaggca

SEQ ID NO: 2316 - DNA, 20 bp, synthetic construct
  source 1..20: mol_type = other DNA
tccactaagtccctcgaacc

SEQ ID NO: 2317 - DNA, 20 bp, synthetic construct
  source 1..20: mol_type = other DNA
gctgtctctgattgtgctga

SEQ ID NO: 2318 - DNA, 20 bp, synthetic construct
  source 1..20: mol_type = other DNA
tctgtgtcacaggtggagtt

SEQ ID NO: 2319 - DNA, 20 bp, synthetic construct
  source 1..20: mol_type = other DNA
tccataattatccacctgga

SEQ ID NO: 2320 - DNA, 20 bp, synthetic construct
  source 1..20: mol_type = other DNA
gcggcatttcccaatgactg

SEQ ID NO: 2321 - DNA, 20 bp, synthetic construct
  source 1..20: mol_type = other DNA
caatccagtccagaaatggg

SEQ ID NO: 2322 - DNA, 20 bp, synthetic construct
  source 1..20: mol_type = other DNA
acgcaaagccacttgtgcat

SEQ ID NO: 2323 - DNA, 20 bp, synthetic construct
  source 1..20: mol_type = other DNA
gccctgtagtgaaacacaac

SEQ ID NO: 2324 - DNA, 20 bp, synthetic construct
  source 1..20: mol_type = other DNA
attacgacagggattagagt

SEQ ID NO: 2325 - DNA, 20 bp, synthetic construct
  source 1..20: mol_type = other DNA
cacgcatctggcgttccagg

SEQ ID NO: 2326 - DNA, 20 bp, synthetic construct
  source 1..20: mol_type = other DNA
gatggcgtcggccagcgaga

SEQ ID NO: 2327 - DNA, 20 bp, synthetic construct
  source 1..20: mol_type = other DNA
ggacaatggtgccgcccacc

SEQ ID NO: 2328 - DNA, 20 bp, synthetic construct
  source 1..20: mol_type = other DNA
gaaggtcaggtacatgaaag

SEQ ID NO: 2329 - DNA, 20 bp, synthetic construct
  source 1..20: mol_type = other DNA
gtgcgatgctttctgtgact

SEQ ID NO: 2330 - DNA, 20 bp, synthetic construct
  source 1..20: mol_type = other DNA
gtgttattcacttatgcctg

SEQ ID NO: 2331 - DNA, 20 bp, synthetic construct
  source 1..20: mol_type = other DNA
gggtgaaattggcaaagaca

SEQ ID NO: 2332 - DNA, 20 bp, synthetic construct
  source 1..20: mol_type = other DNA
cactgttgagactcttgaca

SEQ ID NO: 2333 - DNA, 20 bp, synthetic construct
  source 1..20: mol_type = other DNA
agcctcaaagcttggccagg

SEQ ID NO: 2334 - DNA, 20 bp, synthetic construct
  source 1..20: mol_type = other DNA
ctatagctcgcgagcctctg

SEQ ID NO: 2335 - DNA, 20 bp, synthetic construct
  source 1..20: mol_type = other DNA
ggcccttcaaggagcgggtg

SEQ ID NO: 2336 - DNA, 20 bp, synthetic construct
  source 1..20: mol_type = other DNA
caactgaaccaaacagatct

SEQ ID NO: 2337 - DNA, 20 bp, synthetic construct
  source 1..20: mol_type = other DNA
cggaagaacaccgagagata

SEQ ID NO: 2338 - DNA, 20 bp, synthetic construct
  source 1..20: mol_type = other DNA
gtccaacctgttagagctac

SEQ ID NO: 2339 - DNA, 20 bp, synthetic construct
  source 1..20: mol_type = other DNA
ccatgaaatgactactaggt

SEQ ID NO: 2340 - DNA, 20 bp, synthetic construct
  source 1..20: mol_type = other DNA
cgtgacctcatcttgacaca

SEQ ID NO: 2341 - DNA, 20 bp, synthetic construct
  source 1..20: mol_type = other DNA
gactgacctgctctctggct

SEQ ID NO: 2342 - DNA, 20 bp, synthetic construct
  source 1..20: mol_type = other DNA
tgtcagcatactgccgcggg

SEQ ID NO: 2343 - DNA, 20 bp, synthetic construct
  source 1..20: mol_type = other DNA
caggaaaaggcaggcgagtg

SEQ ID NO: 2344 - DNA, 20 bp, synthetic construct
  source 1..20: mol_type = other DNA
aaatggccaacagaacaacc

SEQ ID NO: 2345 - DNA, 20 bp, synthetic construct
  source 1..20: mol_type = other DNA
gtaggccttgttgggcccaa

SEQ ID NO: 2346 - DNA, 20 bp, synthetic construct
  source 1..20: mol_type = other DNA
agtcacagctgagaccttcc

SEQ ID NO: 2347 - DNA, 20 bp, synthetic construct
  source 1..20: mol_type = other DNA
ctatcactaccaaggcaatc

SEQ ID NO: 2348 - DNA, 20 bp, synthetic construct
  source 1..20: mol_type = other DNA
gttgctgggttcttaacaca

SEQ ID NO: 2349 - DNA, 20 bp, synthetic construct
  source 1..20: mol_type = other DNA
aacaactcagctgtgagagg

SEQ ID NO: 2350 - DNA, 20 bp, synthetic construct
  source 1..20: mol_type = other DNA
tgtgttgggtcttcctgcga

SEQ ID NO: 2351 - DNA, 20 bp, synthetic construct
  source 1..20: mol_type = other DNA
gtcacattgaaaagcttctc

SEQ ID NO: 2352 - DNA, 20 bp, synthetic construct
  source 1..20: mol_type = other DNA
ggattacgtctcctccaaat

SEQ ID NO: 2353 - DNA, 20 bp, synthetic construct
  source 1..20: mol_type = other DNA
atcaaacaagccctgctcgt

SEQ ID NO: 2354 - DNA, 20 bp, synthetic construct
  source 1..20: mol_type = other DNA
agagaagatcacaaggatgc

SEQ ID NO: 2355 - DNA, 20 bp, synthetic construct
  source 1..20: mol_type = other DNA
taaggttgaccgcattgtcg

SEQ ID NO: 2356 - DNA, 20 bp, synthetic construct
  source 1..20: mol_type = other DNA
catttgaccaaatccctcat

SEQ ID NO: 2357 - DNA, 20 bp, synthetic construct
  source 1..20: mol_type = other DNA
cacaaagaccatcaagaggc

SEQ ID NO: 2358 - DNA, 20 bp, synthetic construct
  source 1..20: mol_type = other DNA
tgagttcgaagatgcagagg

SEQ ID NO: 2359 - DNA, 20 bp, synthetic construct
  source 1..20: mol_type = other DNA
actctctgcttgcaaagtct

SEQ ID NO: 2360 - DNA, 20 bp, synthetic construct
  source 1..20: mol_type = other DNA
gccatgtaacttggacttct

SEQ ID NO: 2361 - DNA, 20 bp, synthetic construct
  source 1..20: mol_type = other DNA
ggacagaagagtttgtgttt

SEQ ID NO: 2362 - DNA, 20 bp, synthetic construct
  source 1..20: mol_type = other DNA
ctgaacctcatcatttcgcc

SEQ ID NO: 2363 - DNA, 20 bp, synthetic construct
  source 1..20: mol_type = other DNA
acgccaagacagagttgggc

SEQ ID NO: 2364 - DNA, 20 bp, synthetic construct
  source 1..20: mol_type = other DNA
cgcagttggccatagggctc

SEQ ID NO: 2365 - DNA, 20 bp, synthetic construct
  source 1..20: mol_type = other DNA
gtcaccgaactatcagcctg

SEQ ID NO: 2366 - DNA, 20 bp, synthetic construct
  source 1..20: mol_type = other DNA
gagtgcgtctctagcacttt

SEQ ID NO: 2367 - DNA, 20 bp, synthetic construct
  source 1..20: mol_type = other DNA
tactgatgatgcttcaaagg

SEQ ID NO: 2368 - DNA, 20 bp, synthetic construct
  source 1..20: mol_type = other DNA
gactcccagcgtcagctcca

SEQ ID NO: 2369 - DNA, 20 bp, synthetic construct
  source 1..20: mol_type = other DNA
ctctctggatgtctgcatca

SEQ ID NO: 2370 - DNA, 20 bp, synthetic construct
  source 1..20: mol_type = other DNA
catctgttgccaaaccactg

SEQ ID NO: 2371 - DNA, 20 bp, synthetic construct
  source 1..20: mol_type = other DNA
gcggcaggttatattcaaat

SEQ ID NO: 2372 - DNA, 20 bp, synthetic construct
  source 1..20: mol_type = other DNA
aaagcatggaatgacgacag

SEQ ID NO: 2373 - DNA, 20 bp, synthetic construct
  source 1..20: mol_type = other DNA
gtcccttagagggttccctc

SEQ ID NO: 2374 - DNA, 20 bp, synthetic construct
  source 1..20: mol_type = other DNA
taaaggcgagtgggaaggag

SEQ ID NO: 2375 - DNA, 20 bp, synthetic construct
  source 1..20: mol_type = other DNA
tttctgccactattttcctc

SEQ ID NO: 2376 - DNA, 20 bp, synthetic construct
  source 1..20: mol_type = other DNA
ttgtccaagggtgacgaaag

SEQ ID NO: 2377 - DNA, 20 bp, synthetic construct
  source 1..20: mol_type = other DNA
tgacagatcagggaggaggg

SEQ ID NO: 2378 - DNA, 20 bp, synthetic construct
  source 1..20: mol_type = other DNA
cattttcttctccttttgcc

SEQ ID NO: 2379 - DNA, 20 bp, synthetic construct
  source 1..20: mol_type = other DNA
ttgcgtccacttctggtcta

SEQ ID NO: 2380 - DNA, 20 bp, synthetic construct
  source 1..20: mol_type = other DNA
gtatagatgagcaggtcaaa

SEQ ID NO: 2381 - DNA, 20 bp, synthetic construct
  source 1..20: mol_type = other DNA
cagatgcataagcacagcag

SEQ ID NO: 2382 - DNA, 20 bp, synthetic construct
  source 1..20: mol_type = other DNA
tcacaggcgaagtccagccc

SEQ ID NO: 2383 - DNA, 20 bp, synthetic construct
  source 1..20: mol_type = other DNA
ttaagcaaggaagtgcatgt

SEQ ID NO: 2384 - DNA, 20 bp, synthetic construct
  source 1..20: mol_type = other DNA
ccgctgttctttgtagtgat

SEQ ID NO: 2385 - DNA, 20 bp, synthetic construct
  source 1..20: mol_type = other DNA
tttctggtaagtgtctggtg

SEQ ID NO: 2386 - DNA, 20 bp, synthetic construct
  source 1..20: mol_type = other DNA
ggccgttgtgcttcacaaga

SEQ ID NO: 2387 - DNA, 20 bp, synthetic construct
  source 1..20: mol_type = other DNA
agtcattcatgatgtcccta

SEQ ID NO: 2388 - DNA, 20 bp, synthetic construct
  source 1..20: mol_type = other DNA
gttggtgctgaggatgctgc

SEQ ID NO: 2389 - DNA, 20 bp, synthetic construct
  source 1..20: mol_type = other DNA
cagacttcagtcacctggct

SEQ ID NO: 2390 - DNA, 20 bp, synthetic construct
  source 1..20: mol_type = other DNA
ctccacaaaacttccctggg

SEQ ID NO: 2391 - DNA, 20 bp, synthetic construct
  source 1..20: mol_type = other DNA
gtacaccatgattcacattc

SEQ ID NO: 2392 - DNA, 20 bp, synthetic construct
  source 1..20: mol_type = other DNA
ccgtcactaacctctaactg

SEQ ID NO: 2393 - DNA, 20 bp, synthetic construct
  source 1..20: mol_type = other DNA
cctgtacaccctggccttca

SEQ ID NO: 2394 - DNA, 20 bp, synthetic construct
  source 1..20: mol_type = other DNA
gctggtaaggactgtgaggc

SEQ ID NO: 2395 - DNA, 20 bp, synthetic construct
  source 1..20: mol_type = other DNA
ggattgagtccgtttatgtt

SEQ ID NO: 2396 - DNA, 20 bp, synthetic construct
  source 1..20: mol_type = other DNA
ttacattatcccagacacct

SEQ ID NO: 2397 - DNA, 20 bp, synthetic construct
  source 1..20: mol_type = other DNA
cgccagatccaagcaccttc

SEQ ID NO: 2398 - DNA, 20 bp, synthetic construct
  source 1..20: mol_type = other DNA
ccgtggaatgtcacgttctt

SEQ ID NO: 2399 - DNA, 20 bp, synthetic construct
  source 1..20: mol_type = other DNA
cttggagttgatgtcagtca

SEQ ID NO: 2400 - DNA, 20 bp, synthetic construct
  source 1..20: mol_type = other DNA
catgtggtcaatgacgaact

SEQ ID NO: 2401 - DNA, 20 bp, synthetic construct
  source 1..20: mol_type = other DNA
ctcttgtgtccttcaagtag

SEQ ID NO: 2402 - DNA, 20 bp, synthetic construct
  source 1..20: mol_type = other DNA
aaacctcggcttcctccata

SEQ ID NO: 2403 - DNA, 20 bp, synthetic construct
  source 1..20: mol_type = other DNA
tctcactgtgacagcaggag

SEQ ID NO: 2404 - DNA, 20 bp, synthetic construct
  source 1..20: mol_type = other DNA
tgaacggtaacactgattgc

SEQ ID NO: 2405 - DNA, 20 bp, synthetic construct
  source 1..20: mol_type = other DNA
cgccggactcttagaagcta

SEQ ID NO: 2406 - DNA, 20 bp, synthetic construct
  source 1..20: mol_type = other DNA
tgaggtcctcacagatctgc

SEQ ID NO: 2407 - DNA, 20 bp, synthetic construct
  source 1..20: mol_type = other DNA
agatcttgttctctcaccag

SEQ ID NO: 2408 - DNA, 20 bp, synthetic construct
  source 1..20: mol_type = other DNA
gcatcctcataacctttctc

SEQ ID NO: 2409 - DNA, 20 bp, synthetic construct
  source 1..20: mol_type = other DNA
ttggctacattccaggaaat

SEQ ID NO: 2410 - DNA, 20 bp, synthetic construct
  source 1..20: mol_type = other DNA
atgccagaaatctataggag

SEQ ID NO: 2411 - DNA, 20 bp, synthetic construct
  source 1..20: mol_type = other DNA
tttggtgcaggctcgtggag

SEQ ID NO: 2412 - DNA, 20 bp, synthetic construct
  source 1..20: mol_type = other DNA
ctggagggagatgaaggagg

SEQ ID NO: 2413 - DNA, 20 bp, synthetic construct
  source 1..20: mol_type = other DNA
tcttatgtggagcatcttga

SEQ ID NO: 2414 - DNA, 20 bp, synthetic construct
  source 1..20: mol_type = other DNA
ttccaggctttgtggcaaca

SEQ ID NO: 2415 - DNA, 20 bp, synthetic construct
  source 1..20: mol_type = other DNA
tgcctattctgatggttgct

SEQ ID NO: 2416 - DNA, 20 bp, synthetic construct
  source 1..20: mol_type = other DNA
aaatctcaacattccaaggg

SEQ ID NO: 2417 - DNA, 20 bp, synthetic construct
  source 1..20: mol_type = other DNA
tgatttccaggttggctttg

SEQ ID NO: 2418 - DNA, 20 bp, synthetic construct
  source 1..20: mol_type = other DNA
gaagccacgtgacattgacc

SEQ ID NO: 2419 - DNA, 20 bp, synthetic construct
  source 1..20: mol_type = other DNA
gccacacagtgctttgctgt

SEQ ID NO: 2420 - DNA, 20 bp, synthetic construct
  source 1..20: mol_type = other DNA
gaaagacgctgctttggcct

SEQ ID NO: 2421 - DNA, 20 bp, synthetic construct
  source 1..20: mol_type = other DNA
ccaaaggacttaactgatct

SEQ ID NO: 2422 - DNA, 20 bp, synthetic construct
  source 1..20: mol_type = other DNA
gggaacacatccggagcctt

SEQ ID NO: 2423 - DNA, 20 bp, synthetic construct
  source 1..20: mol_type = other DNA
gggactgaaacccgtggcct

SEQ ID NO: 2424 - DNA, 20 bp, synthetic construct
  source 1..20: mol_type = other DNA
gcatgcacacacagagcggc

SEQ ID NO: 2425 - DNA, 20 bp, synthetic construct
  source 1..20: mol_type = other DNA
ttggatctgttagcctctgg

SEQ ID NO: 2426 - DNA, 20 bp, synthetic construct
  source 1..20: mol_type = other DNA
tgacgttggtcacggtgaaa

SEQ ID NO: 2427 - DNA, 20 bp, synthetic construct
  source 1..20: mol_type = other DNA
ccaccctgatgtctcagttt

SEQ ID NO: 2428 - DNA, 20 bp, synthetic construct
  source 1..20: mol_type = other DNA
tcaccctatggaaacagctt

SEQ ID NO: 2429 - DNA, 20 bp, synthetic construct
  source 1..20: mol_type = other DNA
tcgagaacttggaattttgg

SEQ ID NO: 2430 - DNA, 20 bp, synthetic construct
  source 1..20: mol_type = other DNA
ggccttaatctccaaaggaa

SEQ ID NO: 2431 - DNA, 20 bp, synthetic construct
  source 1..20: mol_type = other DNA
ggtttggtatctgccagttt

SEQ ID NO: 2432 - DNA, 20 bp, synthetic construct
  source 1..20: mol_type = other DNA
cgaatgacagagggtttctt

SEQ ID NO: 2433 - DNA, 20 bp, synthetic construct
  source 1..20: mol_type = other DNA
acttgtttcgttgtgttccg

SEQ ID NO: 2434 - DNA, 20 bp, synthetic construct
  source 1..20: mol_type = other DNA
catcgcgccggaggatgtgg

SEQ ID NO: 2435 - DNA, 20 bp, synthetic construct
  source 1..20: mol_type = other DNA
cctgtgattaacgagggagt

SEQ ID NO: 2436 - DNA, 20 bp, synthetic construct
  source 1..20: mol_type = other DNA
ggagcagctcacaggtttgg

SEQ ID NO: 2437 - DNA, 20 bp, synthetic construct
  source 1..20: mol_type = other DNA
gcgcagaatgagatgagttg

SEQ ID NO: 2438 - DNA, 20 bp, synthetic construct
  source 1..20: mol_type = other DNA
cgcaggcacggctctaggct

SEQ ID NO: 2439 - DNA, 20 bp, synthetic construct
  source 1..20: mol_type = other DNA
agtagtcatccagttctgca

SEQ ID NO: 2440 - DNA, 20 bp, synthetic construct
  source 1..20: mol_type = other DNA
cctatttgagacttgactcc

SEQ ID NO: 2441 - DNA, 20 bp, synthetic construct
  source 1..20: mol_type = other DNA
tgtagactcagcccaatatc

SEQ ID NO: 2442 - DNA, 20 bp, synthetic construct
  source 1..20: mol_type = other DNA
gacaggtcaagcgggaagaa

SEQ ID NO: 2443 - DNA, 20 bp, synthetic construct
  source 1..20: mol_type = other DNA
ctgtcacgttgaactcccgg

SEQ ID NO: 2444 - DNA, 20 bp, synthetic construct
  source 1..20: mol_type = other DNA
atttggtgaattgttcgtgg

SEQ ID NO: 2445 - DNA, 20 bp, synthetic construct
  source 1..20: mol_type = other DNA
ggtccatcccgtcctgctgc

SEQ ID NO: 2446 - DNA, 20 bp, synthetic construct
  source 1..20: mol_type = other DNA
ccctcaaagcccgggtggca

SEQ ID NO: 2447 - DNA, 20 bp, synthetic construct
  source 1..20: mol_type = other DNA
tgggtagcagtaactatctg

SEQ ID NO: 2448 - DNA, 20 bp, synthetic construct
  source 1..20: mol_type = other DNA
tagggccaactcgtcatcct

SEQ ID NO: 2449 - DNA, 20 bp, synthetic construct
  source 1..20: mol_type = other DNA
ctgttattccaagggttgac

SEQ ID NO: 2450 - DNA, 20 bp, synthetic construct
  source 1..20: mol_type = other DNA
gggctgtaaaataggtgaaa

SEQ ID NO: 2451 - DNA, 20 bp, synthetic construct
  source 1..20: mol_type = other DNA
agtaaatgctggctcaatac

SEQ ID NO: 2452 - DNA, 20 bp, synthetic construct
  source 1..20: mol_type = other DNA
aataccattcacggttccag

SEQ ID NO: 2453 - DNA, 20 bp, synthetic construct
  source 1..20: mol_type = other DNA
atgacaacactggatgaccg

SEQ ID NO: 2454 - DNA, 20 bp, synthetic construct
  source 1..20: mol_type = other DNA
agatcatgtcattcacttgc

SEQ ID NO: 2455 - DNA, 20 bp, synthetic construct
  source 1..20: mol_type = other DNA
tgccaatgtgacagtggcat

SEQ ID NO: 2456 - DNA, 20 bp, synthetic construct
  source 1..20: mol_type = other DNA
ttggtgctcgaataatgtca

SEQ ID NO: 2457 - DNA, 20 bp, synthetic construct
  source 1..20: mol_type = other DNA
ggaccgattgcctgcctgcc

SEQ ID NO: 2458 - DNA, 20 bp, synthetic construct
  source 1..20: mol_type = other DNA
tgtctccgcttcatgccatt

SEQ ID NO: 2459 - DNA, 20 bp, synthetic construct
  source 1..20: mol_type = other DNA
cacccatcggaatttctgtg

SEQ ID NO: 2460 - DNA, 20 bp, synthetic construct
  source 1..20: mol_type = other DNA
ctgggatcatcagaagaccc

SEQ ID NO: 2461 - DNA, 20 bp, synthetic construct
  source 1..20: mol_type = other DNA
tcctactatgtccttttcct

SEQ ID NO: 2462 - DNA, 20 bp, synthetic construct
  source 1..20: mol_type = other DNA
ctttgtgtttccagatgatg

SEQ ID NO: 2463 - DNA, 20 bp, synthetic construct
  source 1..20: mol_type = other DNA
agatccgctgctggtttggg

SEQ ID NO: 2464 - DNA, 20 bp, synthetic construct
  source 1..20: mol_type = other DNA
ccgagagggtgggtgtgtca

SEQ ID NO: 2465 - DNA, 20 bp, synthetic construct
  source 1..20: mol_type = other DNA
ggtcagctaatgctctgagc

SEQ ID NO: 2466 - DNA, 20 bp, synthetic construct
  source 1..20: mol_type = other DNA
tttccttatagtagccacca

SEQ ID NO: 2467 - DNA, 20 bp, synthetic construct
  source 1..20: mol_type = other DNA
catactccgtctgctcaggg

SEQ ID NO: 2468 - DNA, 20 bp, synthetic construct
  source 1..20: mol_type = other DNA
ggctgcttccataagcacgt

SEQ ID NO: 2469 - DNA, 20 bp, synthetic construct
  source 1..20: mol_type = other DNA
catcaaaggagatgacgtgg

SEQ ID NO: 2470 - DNA, 20 bp, synthetic construct
  source 1..20: mol_type = other DNA
gatctgttcttgtgaatgga

SEQ ID NO: 2471 - DNA, 20 bp, synthetic construct
  source 1..20: mol_type = other DNA
agtcaccaaaaggctttcgc

SEQ ID NO: 2472 - DNA, 20 bp, synthetic construct
  source 1..20: mol_type = other DNA
ccttgttgcaagtctgacat

SEQ ID NO: 2473 - DNA, 20 bp, synthetic construct
  source 1..20: mol_type = other DNA
cattcatgctgctcacagcg

SEQ ID NO: 2474 - DNA, 20 bp, synthetic construct
  source 1..20: mol_type = other DNA
gcatccgtggcagtgaacca

SEQ ID NO: 2475 - DNA, 20 bp, synthetic construct
  source 1..20: mol_type = other DNA
cggaattttaggtggccatg

SEQ ID NO: 2476 - DNA, 20 bp, synthetic construct
  source 1..20: mol_type = other DNA
tgcttccaactctgcagaca

SEQ ID NO: 2477 - DNA, 20 bp, synthetic construct
  source 1..20: mol_type = other DNA
tagtcagcattgtaagttgg

SEQ ID NO: 2478 - DNA, 20 bp, synthetic construct
  source 1..20: mol_type = other DNA
ctatccagtagtaagaacga

SEQ ID NO: 2479 - DNA, 20 bp, synthetic construct
  source 1..20: mol_type = other DNA
caccacacaaaacgtttcat

SEQ ID NO: 2480 - DNA, 20 bp, synthetic construct
  source 1..20: mol_type = other DNA
gttgctacctcttgcctctt

SEQ ID NO: 2481 - DNA, 20 bp, synthetic construct
  source 1..20: mol_type = other DNA
tgagtcaagctgctgaagtt

SEQ ID NO: 2482 - DNA, 20 bp, synthetic construct
  source 1..20: mol_type = other DNA
gcacgtactccatcgctgac

SEQ ID NO: 2483 - DNA, 20 bp, synthetic construct
  source 1..20: mol_type = other DNA
tcctttagcaacagccgttc

SEQ ID NO: 2484 - DNA, 20 bp, synthetic construct
  source 1..20: mol_type = other DNA
ttgactcaatgtggcaggtg

SEQ ID NO: 2485 - DNA, 20 bp, synthetic construct
  source 1..20: mol_type = other DNA
atcaatgctcgggccaacgc

SEQ ID NO: 2486 - DNA, 20 bp, synthetic construct
  source 1..20: mol_type = other DNA
gccagcatatgccttcagtt

SEQ ID NO: 2487 - DNA, 20 bp, synthetic construct
  source 1..20: mol_type = other DNA
atgaaacttcctggcgcatc

SEQ ID NO: 2488 - DNA, 20 bp, synthetic construct
  source 1..20: mol_type = other DNA
acatgccaacgaaaaggttg

SEQ ID NO: 2489 - DNA, 20 bp, synthetic construct
  source 1..20: mol_type = other DNA
tgcgtgaccatctataaaag

SEQ ID NO: 2490 - DNA, 20 bp, synthetic construct
  source 1..20: mol_type = other DNA
tctcacaagttcacggagct

SEQ ID NO: 2491 - DNA, 20 bp, synthetic construct
  source 1..20: mol_type = other DNA
gcgtagtagtcggcctcagg

SEQ ID NO: 2492 - DNA, 20 bp, synthetic construct
  source 1..20: mol_type = other DNA
cgatcatgttggacagctgc

SEQ ID NO: 2493 - DNA, 20 bp, synthetic construct
  source 1..20: mol_type = other DNA
tatgaaatggtcttctctgg

SEQ ID NO: 2494 - DNA, 20 bp, synthetic construct
  source 1..20: mol_type = other DNA
cctgtatcgttcacggtcag

SEQ ID NO: 2495 - DNA, 20 bp, synthetic construct
  source 1..20: mol_type = other DNA
ttccactttacctggatcta

SEQ ID NO: 2496 - DNA, 20 bp, synthetic construct
  source 1..20: mol_type = other DNA
atttacccaaaatccttccc

SEQ ID NO: 2497 - DNA, 20 bp, synthetic construct
  source 1..20: mol_type = other DNA
tggaaaccttcatggatgat

SEQ ID NO: 2498 - DNA, 20 bp, synthetic construct
  source 1..20: mol_type = other DNA
ggtcttattcatctgacagg

SEQ ID NO: 2499 - DNA, 20 bp, synthetic construct
  source 1..20: mol_type = other DNA
gagcagctagaatgttgaga

SEQ ID NO: 2500 - DNA, 20 bp, synthetic construct
  source 1..20: mol_type = other DNA
agacagccgctatgcacacc

SEQ ID NO: 2501 - DNA, 20 bp, synthetic construct
  source 1..20: mol_type = other DNA
gatcctgcaatgatcttgtc

SEQ ID NO: 2502 - DNA, 20 bp, synthetic construct
  source 1..20: mol_type = other DNA
ctgatcgttaaatgtcccaa

SEQ ID NO: 2503 - DNA, 20 bp, synthetic construct
  source 1..20: mol_type = other DNA
gctcaatctgtcttcctcat

SEQ ID NO: 2504 - DNA, 20 bp, synthetic construct
  source 1..20: mol_type = other DNA
aaatgtgacatctccatcca

SEQ ID NO: 2505 - DNA, 20 bp, synthetic construct
  source 1..20: mol_type = other DNA
aaaacatgtctgagccaagg

SEQ ID NO: 2506 - DNA, 20 bp, synthetic construct
  source 1..20: mol_type = other DNA
cttcatgagatgatctcctt

SEQ ID NO: 2507 - DNA, 20 bp, synthetic construct
  source 1..20: mol_type = other DNA
ccatgccagtactatacaga

SEQ ID NO: 2508 - DNA, 20 bp, synthetic construct
  source 1..20: mol_type = other DNA
ctctgagcaaggcccacagg

SEQ ID NO: 2509 - DNA, 20 bp, synthetic construct
  source 1..20: mol_type = other DNA
accgatcagggagagagaga

SEQ ID NO: 2510 - DNA, 20 bp, synthetic construct
  source 1..20: mol_type = other DNA
aaccagtccatagaagaggt

SEQ ID NO: 2511 - DNA, 20 bp, synthetic construct
  source 1..20: mol_type = other DNA
ctcatggagaagcatccggg

SEQ ID NO: 2512 - DNA, 20 bp, synthetic construct
  source 1..20: mol_type = other DNA
ggaatgagagaagcaggtgg

SEQ ID NO: 2513 - DNA, 20 bp, synthetic construct
  source 1..20: mol_type = other DNA
tgactagtggtggcaggact

SEQ ID NO: 2514 - DNA, 20 bp, synthetic construct
  source 1..20: mol_type = other DNA
atccttccacgcatgacacc

SEQ ID NO: 2515 - DNA, 20 bp, synthetic construct
  source 1..20: mol_type = other DNA
gtcacttcgccctgagagac

SEQ ID NO: 2516 - DNA, 20 bp, synthetic construct
  source 1..20: mol_type = other DNA
ccaggtggaaagaatgatga

SEQ ID NO: 2517 - DNA, 20 bp, synthetic construct
  source 1..20: mol_type = other DNA
ttgctttgctgtgagggaac

SEQ ID NO: 2518 - DNA, 20 bp, synthetic construct
  source 1..20: mol_type = other DNA
ctctatgcagcagccaatgt

SEQ ID NO: 2519 - DNA, 20 bp, synthetic construct
  source 1..20: mol_type = other DNA
caaaacctcctggaatccca

SEQ ID NO: 2520 - DNA, 20 bp, synthetic construct
  source 1..20: mol_type = other DNA
ccaagaggttcctccacact

SEQ ID NO: 2521 - DNA, 20 bp, synthetic construct
  source 1..20: mol_type = other DNA
gtgtgagcaccttgtggtcc

SEQ ID NO: 2522 - DNA, 20 bp, synthetic construct
  source 1..20: mol_type = other DNA
gggatgatggtctgcttcag

SEQ ID NO: 2523 - DNA, 20 bp, synthetic construct
  source 1..20: mol_type = other DNA
cgcagagaggaatctaaagt

SEQ ID NO: 2524 - DNA, 20 bp, synthetic construct
  source 1..20: mol_type = other DNA
gggactcaagcaagtacaaa

SEQ ID NO: 2525 - DNA, 20 bp, synthetic construct
  source 1..20: mol_type = other DNA
gcactagtagcctcatccag

SEQ ID NO: 2526 - DNA, 20 bp, synthetic construct
  source 1..20: mol_type = other DNA
cacacgaccagaatagtgag

SEQ ID NO: 2527 - DNA, 20 bp, synthetic construct
  source 1..20: mol_type = other DNA
gcatttgtagaggaagttct

SEQ ID NO: 2528 - DNA, 20 bp, synthetic construct
  source 1..20: mol_type = other DNA
caggtaattgtcacggagac

SEQ ID NO: 2529 - DNA, 20 bp, synthetic construct
  source 1..20: mol_type = other DNA
gtgtgaacaaggtctggacg

SEQ ID NO: 2530 - DNA, 20 bp, synthetic construct
  source 1..20: mol_type = other DNA
attgggtccatcattttgtg

SEQ ID NO: 2531 - DNA, 20 bp, synthetic construct
  source 1..20: mol_type = other DNA
gcgtacagttctagagagag

SEQ ID NO: 2532 - DNA, 20 bp, synthetic construct
  source 1..20: mol_type = other DNA
tgttctggctctatactctc

SEQ ID NO: 2533 - DNA, 20 bp, synthetic construct
  source 1..20: mol_type = other DNA
ctcatctggtgagcctgaga

SEQ ID NO: 2534 - DNA, 20 bp, synthetic construct
  source 1..20: mol_type = other DNA
gtccacacacacaattgact

SEQ ID NO: 2535 - DNA, 20 bp, synthetic construct
  source 1..20: mol_type = other DNA
tccaccggacagcactctaa

SEQ ID NO: 2536 - DNA, 20 bp, synthetic construct
  source 1..20: mol_type = other DNA
atgaaattcaactggtgggt

SEQ ID NO: 2537 - DNA, 20 bp, synthetic construct
  source 1..20: mol_type = other DNA
tgttcaggtagcggtcaaag

SEQ ID NO: 2538 - DNA, 20 bp, synthetic construct
  source 1..20: mol_type = other DNA
gccactttgcagaggccaga

SEQ ID NO: 2539 - DNA, 20 bp, synthetic construct
  source 1..20: mol_type = other DNA
agtcctaccacgagacatac

SEQ ID NO: 2540 - DNA, 20 bp, synthetic construct
  source 1..20: mol_type = other DNA
ttccttcatggagtcatagt

SEQ ID NO: 2541 - DNA, 20 bp, synthetic construct
  source 1..20: mol_type = other DNA
atcacagttttgcagaggaa

SEQ ID NO: 2542 - DNA, 20 bp, synthetic construct
  source 1..20: mol_type = other DNA
cgttatagttgtccaatctg

SEQ ID NO: 2543 - DNA, 20 bp, synthetic construct
  source 1..20: mol_type = other DNA
gttgttggcaaggcattggt

SEQ ID NO: 2544 - DNA, 20 bp, synthetic construct
  source 1..20: mol_type = other DNA
tcactgctgctctgatctac

SEQ ID NO: 2545 - DNA, 20 bp, synthetic construct
  source 1..20: mol_type = other DNA
tggaggtgcagtttttgaag

SEQ ID NO: 2546 - DNA, 20 bp, synthetic construct
  source 1..20: mol_type = other DNA
ccaaagctgtatttgccctc

SEQ ID NO: 2547 - DNA, 20 bp, synthetic construct
  source 1..20: mol_type = other DNA
tattcgagggcttatcggtg

SEQ ID NO: 2548 - DNA, 20 bp, synthetic construct
  source 1..20: mol_type = other DNA
actcctttcccgttcatgca

SEQ ID NO: 2549 - DNA, 20 bp, synthetic construct
  source 1..20: mol_type = other DNA
cactcgtgcagttctacgat

SEQ ID NO: 2550 - DNA, 20 bp, synthetic construct
  source 1..20: mol_type = other DNA
gtaagcgatagtggttggct

SEQ ID NO: 2551 - DNA, 20 bp, synthetic construct
  source 1..20: mol_type = other DNA
ggactatctatgagcaccta

SEQ ID NO: 2552 - DNA, 20 bp, synthetic construct
  source 1..20: mol_type = other DNA
cgtcaatcccttttatatcc

SEQ ID NO: 2553 - DNA, 20 bp, synthetic construct
  source 1..20: mol_type = other DNA
tgttcaaccctggccgtctc

SEQ ID NO: 2554 - DNA, 20 bp, synthetic construct
  source 1..20: mol_type = other DNA
tcactcaatcgcgcggcatg

SEQ ID NO: 2555 - DNA, 20 bp, synthetic construct
  source 1..20: mol_type = other DNA
acctccgctttgctactaca

SEQ ID NO: 2556 - DNA, 20 bp, synthetic construct
  source 1..20: mol_type = other DNA
cggatagtgtttgaccgcgt

SEQ ID NO: 2557 - DNA, 20 bp, synthetic construct
  source 1..20: mol_type = other DNA
acaaatagccttcttcatcc

SEQ ID NO: 2558 - DNA, 20 bp, synthetic construct
  source 1..20: mol_type = other DNA
acagtgtcacctttcttgat

SEQ ID NO: 2559 - DNA, 20 bp, synthetic construct
  source 1..20: mol_type = other DNA
ttcctcttcacacactcctc

SEQ ID NO: 2560 - DNA, 20 bp, synthetic construct
  source 1..20: mol_type = other DNA
gttgatgatgactgcggtgg

SEQ ID NO: 2561 - DNA, 20 bp, synthetic construct
  source 1..20: mol_type = other DNA
ctagaactcaaaacactggc

SEQ ID NO: 2562 - DNA, 20 bp, synthetic construct
  source 1..20: mol_type = other DNA
aaagctgtcgtatacgaagt

SEQ ID NO: 2563 - DNA, 20 bp, synthetic construct
  source 1..20: mol_type = other DNA
cacagatggacaggctgcct

SEQ ID NO: 2564 - DNA, 20 bp, synthetic construct
  source 1..20: mol_type = other DNA
gtgaaagagcattccacatt

SEQ ID NO: 2565 - DNA, 20 bp, synthetic construct
  source 1..20: mol_type = other DNA
tagaacccaaggaagcagag

SEQ ID NO: 2566 - DNA, 20 bp, synthetic construct
  source 1..20: mol_type = other DNA
cttggctcggtacttgttca

SEQ ID NO: 2567 - DNA, 20 bp, synthetic construct
  source 1..20: mol_type = other DNA
gagaaccaatggcctagctc

SEQ ID NO: 2568 - DNA, 20 bp, synthetic construct
  source 1..20: mol_type = other DNA
acatgctgtgaacaaagtca

SEQ ID NO: 2569 - DNA, 20 bp, synthetic construct
  source 1..20: mol_type = other DNA
atcaggttgctgcacagctt

SEQ ID NO: 2570 - DNA, 20 bp, synthetic construct
  source 1..20: mol_type = other DNA
gtggccggctaggcagatgg

SEQ ID NO: 2571 - DNA, 20 bp, synthetic construct
  source 1..20: mol_type = other DNA
tttcatcgtgggtagcaagc

SEQ ID NO: 2572 - DNA, 20 bp, synthetic construct
  source 1..20: mol_type = other DNA
gttactctcccggctccgga

SEQ ID NO: 2573 - DNA, 20 bp, synthetic construct
  source 1..20: mol_type = other DNA
ccagcaaggttctttctgtt

SEQ ID NO: 2574 - DNA, 20 bp, synthetic construct
  source 1..20: mol_type = other DNA
gatcgaggcaacgttttggg

SEQ ID NO: 2575 - DNA, 20 bp, synthetic construct
  source 1..20: mol_type = other DNA
gtagcctgttggtttgcaga

SEQ ID NO: 2576 - DNA, 20 bp, synthetic construct
  source 1..20: mol_type = other DNA
ggcctcataaggttcatcta

SEQ ID NO: 2577 - DNA, 20 bp, synthetic construct
  source 1..20: mol_type = other DNA
tatagaagtcccagtgggtg

SEQ ID NO: 2578 - DNA, 20 bp, synthetic construct
  source 1..20: mol_type = other DNA
accttgccttctttgtcttt

SEQ ID NO: 2579 - DNA, 20 bp, synthetic construct
  source 1..20: mol_type = other DNA
tcgaccggtgcaatcttcaa

SEQ ID NO: 2580 - DNA, 20 bp, synthetic construct
  source 1..20: mol_type = other DNA
acaggcgtttcacggcaacg

SEQ ID NO: 2581 - DNA, 20 bp, synthetic construct
  source 1..20: mol_type = other DNA
gcccagtgatttacagaaga

SEQ ID NO: 2582 - DNA, 20 bp, synthetic construct
  source 1..20: mol_type = other DNA
cacagtccgtgtcagggtta

SEQ ID NO: 2583 - DNA, 20 bp, synthetic construct
  source 1..20: mol_type = other DNA
gctgacatagctaagctaag

SEQ ID NO: 2584 - DNA, 20 bp, synthetic construct
  source 1..20: mol_type = other DNA
aagagaacttgtgtgtgttg

SEQ ID NO: 2585 - DNA, 20 bp, synthetic construct
  source 1..20: mol_type = other DNA
tcgccacaaactgaatttgt

SEQ ID NO: 2586 - DNA, 20 bp, synthetic construct
  source 1..20: mol_type = other DNA
ccgttcaactgattccttca

SEQ ID NO: 2587 - DNA, 20 bp, synthetic construct
  source 1..20: mol_type = other DNA
gcgtgcaccctttaagagaa

SEQ ID NO: 2588 - DNA, 20 bp, synthetic construct
  source 1..20: mol_type = other DNA
atcaacagcctgaatagcaa

SEQ ID NO: 2589 - DNA, 20 bp, synthetic construct
  source 1..20: mol_type = other DNA
cagcactgtcaaatgtcacc

SEQ ID NO: 2590 - DNA, 20 bp, synthetic construct
  source 1..20: mol_type = other DNA
acgtagaagctgtagtcacc

SEQ ID NO: 2591 - DNA, 20 bp, synthetic construct
  source 1..20: mol_type = other DNA
gacttggtgggtattggtca

SEQ ID NO: 2592 - DNA, 20 bp, synthetic construct
  source 1..20: mol_type = other DNA
ggccacaaagattgctatca

SEQ ID NO: 2593 - DNA, 20 bp, synthetic construct
  source 1..20: mol_type = other DNA
taccaacacgtaggctttta

SEQ ID NO: 2594 - DNA, 20 bp, synthetic construct
  source 1..20: mol_type = other DNA
gccaacaggaacaccacgcc

SEQ ID NO: 2595 - DNA, 20 bp, synthetic construct
  source 1..20: mol_type = other DNA
ggtcagaaatttctgcctgg

SEQ ID NO: 2596 - DNA, 20 bp, synthetic construct
  source 1..20: mol_type = other DNA
cttcgccttgcgtgaggttt

SEQ ID NO: 2597 - DNA, 20 bp, synthetic construct
  source 1..20: mol_type = other DNA
tgcctctcatgagaagtaat

SEQ ID NO: 2598 - DNA, 20 bp, synthetic construct
  source 1..20: mol_type = other DNA
gcgggtgatgttgacactgt

SEQ ID NO: 2599 - DNA, 20 bp, synthetic construct
  source 1..20: mol_type = other DNA
cgttacacaccaggtgccat

SEQ ID NO: 2600 - DNA, 20 bp, synthetic construct
  source 1..20: mol_type = other DNA
gcgacttgttgagtccaagc

SEQ ID NO: 2601 - DNA, 20 bp, synthetic construct
  source 1..20: mol_type = other DNA
cggctatcaaactgagcctc

SEQ ID NO: 2602 - DNA, 20 bp, synthetic construct
  source 1..20: mol_type = other DNA
tggcaatacaaggcaattcg

SEQ ID NO: 2603 - DNA, 20 bp, synthetic construct
  source 1..20: mol_type = other DNA
gaacacataatctcggttgg

SEQ ID NO: 2604 - DNA, 20 bp, synthetic construct
  source 1..20: mol_type = other DNA
aaaggttatgcaaggtccca

SEQ ID NO: 2605 - DNA, 20 bp, synthetic construct
  source 1..20: mol_type = other DNA
tgaagtaactctgtcagagg

SEQ ID NO: 2606 - DNA, 20 bp, synthetic construct
  source 1..20: mol_type = other DNA
cctaagcctttgtttcatgc

SEQ ID NO: 2607 - DNA, 20 bp, synthetic construct
  source 1..20: mol_type = other DNA
gagtcagttgtattccatct

SEQ ID NO: 2608 - DNA, 20 bp, synthetic construct
  source 1..20: mol_type = other DNA
cttgcttgtcattttctctg

SEQ ID NO: 2609 - DNA, 20 bp, synthetic construct
  source 1..20: mol_type = other DNA
tcccacaggtgggtgcctct

SEQ ID NO: 2610 - DNA, 20 bp, synthetic construct
  source 1..20: mol_type = other DNA
ctaagaaagtcctgcgcaga

SEQ ID NO: 2611 - DNA, 20 bp, synthetic construct
  source 1..20: mol_type = other DNA
gcaggttatttcagtgtcct

SEQ ID NO: 2612 - DNA, 20 bp, synthetic construct
  source 1..20: mol_type = other DNA
gcctcaccttcctgagctgc

SEQ ID NO: 2613 - DNA, 20 bp, synthetic construct
  source 1..20: mol_type = other DNA
gcgcacattacacacctggt

SEQ ID NO: 2614 - DNA, 20 bp, synthetic construct
  source 1..20: mol_type = other DNA
gttacccattttgtgtccat

SEQ ID NO: 2615 - DNA, 20 bp, synthetic construct
  source 1..20: mol_type = other DNA
atgctcacactctctctagt

SEQ ID NO: 2616 - DNA, 20 bp, synthetic construct
  source 1..20: mol_type = other DNA
cgttgagttcggtcacagac

SEQ ID NO: 2617 - DNA, 20 bp, synthetic construct
  source 1..20: mol_type = other DNA
tggtatccgaattcctctgg

SEQ ID NO: 2618 - DNA, 20 bp, synthetic construct
  source 1..20: mol_type = other DNA
tgacagggcagactggtgaa

SEQ ID NO: 2619 - DNA, 20 bp, synthetic construct
  source 1..20: mol_type = other DNA
cttacgacccaccaccagac

SEQ ID NO: 2620 - DNA, 20 bp, synthetic construct
  source 1..20: mol_type = other DNA
cctgatcttcaaactcggcg

SEQ ID NO: 2621 - DNA, 20 bp, synthetic construct
  source 1..20: mol_type = other DNA
tggcttgactgtttttgcag

SEQ ID NO: 2622 - DNA, 20 bp, synthetic construct
  source 1..20: mol_type = other DNA
tgttctccatccttgggatc

SEQ ID NO: 2623 - DNA, 20 bp, synthetic construct
  source 1..20: mol_type = other DNA
tcatcaagctcgctgcttcc

SEQ ID NO: 2624 - DNA, 20 bp, synthetic construct
  source 1..20: mol_type = other DNA
ccaggtgtacaaattcctgc

SEQ ID NO: 2625 - DNA, 20 bp, synthetic construct
  source 1..20: mol_type = other DNA
aatatcagccacaataaggg

SEQ ID NO: 2626 - DNA, 20 bp, synthetic construct
  source 1..20: mol_type = other DNA
accttattcaggccttggag

SEQ ID NO: 2627 - DNA, 20 bp, synthetic construct
  source 1..20: mol_type = other DNA
gactgctccagggtccgcac

SEQ ID NO: 2628 - DNA, 20 bp, synthetic construct
  source 1..20: mol_type = other DNA
gacaggaggttggacgatag

SEQ ID NO: 2629 - DNA, 20 bp, synthetic construct
  source 1..20: mol_type = other DNA
taggtttgctttctcaggct

SEQ ID NO: 2630 - DNA, 20 bp, synthetic construct
  source 1..20: mol_type = other DNA
gtagtttttctaggtccctc

SEQ ID NO: 2631 - DNA, 20 bp, synthetic construct
  source 1..20: mol_type = other DNA
ttgtcaactgcggttgctcc

SEQ ID NO: 2632 - DNA, 20 bp, synthetic construct
  source 1..20: mol_type = other DNA
acaggctcatcaataacaga

SEQ ID NO: 2633 - DNA, 20 bp, synthetic construct
  source 1..20: mol_type = other DNA
tcaaggccgaatctgctctc

SEQ ID NO: 2634 - DNA, 20 bp, synthetic construct
  source 1..20: mol_type = other DNA
caggcttgtcatgctggcag

SEQ ID NO: 2635 - DNA, 20 bp, synthetic construct
  source 1..20: mol_type = other DNA
ttattcagtccagttcagga

SEQ ID NO: 2636 - DNA, 20 bp, synthetic construct
  source 1..20: mol_type = other DNA
gctgggaattgagaatggag

SEQ ID NO: 2637 - DNA, 20 bp, synthetic construct
  source 1..20: mol_type = other DNA
ttctgcatgttcccaaactc

SEQ ID NO: 2638 - DNA, 20 bp, synthetic construct
  source 1..20: mol_type = other DNA
agttgttcttcgggtcgctc

SEQ ID NO: 2639 - DNA, 20 bp, synthetic construct
  source 1..20: mol_type = other DNA
gtcacagtgctgattgcaca

SEQ ID NO: 2640 - DNA, 20 bp, synthetic construct
  source 1..20: mol_type = other DNA
tggctgttgtggtcagctct

SEQ ID NO: 2641 - DNA, 20 bp, synthetic construct
  source 1..20: mol_type = other DNA
ccgtcctgcgtgtgcgtgtt

SEQ ID NO: 2642 - DNA, 20 bp, synthetic construct
  source 1..20: mol_type = other DNA
agtggtgaagtcatccgttg

SEQ ID NO: 2643 - DNA, 20 bp, synthetic construct
  source 1..20: mol_type = other DNA
cgaggattgagttgcaggca

SEQ ID NO: 2644 - DNA, 20 bp, synthetic construct
  source 1..20: mol_type = other DNA
cgatttggtcatgtttcgat

SEQ ID NO: 2645 - DNA, 20 bp, synthetic construct
  source 1..20: mol_type = other DNA
ctgattgggagtagagcaga

SEQ ID NO: 2646 - DNA, 20 bp, synthetic construct
  source 1..20: mol_type = other DNA
gttccctggatcaagcacac

SEQ ID NO: 2647 - DNA, 20 bp, synthetic construct
  source 1..20: mol_type = other DNA
aattcgtattcagcgtgttc

SEQ ID NO: 2648 - DNA, 20 bp, synthetic construct
  source 1..20: mol_type = other DNA
cctcttcatgaacttctcct

SEQ ID NO: 2649 - DNA, 20 bp, synthetic construct
  source 1..20: mol_type = other DNA
tgcccttggaacagcagtga

SEQ ID NO: 2650 - DNA, 20 bp, synthetic construct
  source 1..20: mol_type = other DNA
ttaaatgatccatagacgcc

SEQ ID NO: 2651 - DNA, 20 bp, synthetic construct
  source 1..20: mol_type = other DNA
acatgttgacgtacatgttg

SEQ ID NO: 2652 - DNA, 20 bp, synthetic construct
  source 1..20: mol_type = other DNA
caatacagtcctttgtttgg

SEQ ID NO: 2653 - DNA, 20 bp, synthetic construct
  source 1..20: mol_type = other DNA
ccggcttgatgctgccggtc

SEQ ID NO: 2654 - DNA, 20 bp, synthetic construct
  source 1..20: mol_type = other DNA
caggatcagtgtatacctca

SEQ ID NO: 2655 - DNA, 20 bp, synthetic construct
  source 1..20: mol_type = other DNA
tcatggaattccacgggagg

SEQ ID NO: 2656 - DNA, 20 bp, synthetic construct
  source 1..20: mol_type = other DNA
cacgaatccagtctaggtag

SEQ ID NO: 2657 - DNA, 20 bp, synthetic construct
  source 1..20: mol_type = other DNA
tcgttaggagcttttggctc

SEQ ID NO: 2658 - DNA, 20 bp, synthetic construct
  source 1..20: mol_type = other DNA
atgattttggagccaaagct

SEQ ID NO: 2659 - DNA, 20 bp, synthetic construct
  source 1..20: mol_type = other DNA
gtgcccttggtttttcttct

SEQ ID NO: 2660 - DNA, 20 bp, synthetic construct
  source 1..20: mol_type = other DNA
gaggtcactcacattttaag

SEQ ID NO: 2661 - DNA, 20 bp, synthetic construct
  source 1..20: mol_type = other DNA
tgtgcgtagaaagtgtagtc

SEQ ID NO: 2662 - DNA, 20 bp, synthetic construct
  source 1..20: mol_type = other DNA
gaactgacagctcaaggact

SEQ ID NO: 2663 - DNA, 20 bp, synthetic construct
  source 1..20: mol_type = other DNA
ccttgctcttgaagaagaca

SEQ ID NO: 2664 - DNA, 20 bp, synthetic construct
  source 1..20: mol_type = other DNA
aaggcatgattcccttcctt

SEQ ID NO: 2665 - DNA, 20 bp, synthetic construct
  source 1..20: mol_type = other DNA
gtttttccacatttgcacca

SEQ ID NO: 2666 - DNA, 20 bp, synthetic construct
  source 1..20: mol_type = other DNA
tgttggagacacagcctcgg

SEQ ID NO: 2667 - DNA, 20 bp, synthetic construct
  source 1..20: mol_type = other DNA
tctggcttcctttacaagaa

SEQ ID NO: 2668 - DNA, 20 bp, synthetic construct
  source 1..20: mol_type = other DNA
acccaatcacacacaggtgg

SEQ ID NO: 2669 - DNA, 20 bp, synthetic construct
  source 1..20: mol_type = other DNA
agaccactcagtgtgggcag

SEQ ID NO: 2670 - DNA, 20 bp, synthetic construct
  source 1..20: mol_type = other DNA
ccgtaagactgacactcgag

SEQ ID NO: 2671 - DNA, 20 bp, synthetic construct
  source 1..20: mol_type = other DNA
taatgaatcctcctgacaag

SEQ ID NO: 2672 - DNA, 20 bp, synthetic construct
  source 1..20: mol_type = other DNA
ctatagcctatccacatgtt

SEQ ID NO: 2673 - DNA, 20 bp, synthetic construct
  source 1..20: mol_type = other DNA
ggctcttggcatcgctgtcc

SEQ ID NO: 2674 - DNA, 20 bp, synthetic construct
  source 1..20: mol_type = other DNA
ttctctgttggacttgacat

SEQ ID NO: 2675 - DNA, 20 bp, synthetic construct
  source 1..20: mol_type = other DNA
gcaagatcttaggtggatca

SEQ ID NO: 2676 - DNA, 20 bp, synthetic construct
  source 1..20: mol_type = other DNA
ttggagagagggttctggga

SEQ ID NO: 2677 - DNA, 20 bp, synthetic construct
  source 1..20: mol_type = other DNA
gcctacaatagtgacaagcc

SEQ ID NO: 2678 - DNA, 20 bp, synthetic construct
  source 1..20: mol_type = other DNA
gggcatcatttgagtcctgc

SEQ ID NO: 2679 - DNA, 20 bp, synthetic construct
  source 1..20: mol_type = other DNA
cagaaagcccacaagaaaag

SEQ ID NO: 2680 - DNA, 20 bp, synthetic construct
  source 1..20: mol_type = other DNA
ctgtggcctcaaggcttggt

SEQ ID NO: 2681 - DNA, 20 bp, synthetic construct
  source 1..20: mol_type = other DNA
ccgatggaaatgaaagctcc

SEQ ID NO: 2682 - DNA, 20 bp, synthetic construct
  source 1..20: mol_type = other DNA
agccgcaaagaaatactgaa

SEQ ID NO: 2683 - DNA, 20 bp, synthetic construct
  source 1..20: mol_type = other DNA
gccggtagctcgcgacaacg

SEQ ID NO: 2684 - DNA, 20 bp, synthetic construct
  source 1..20: mol_type = other DNA
tccttctggttcttgtgaat

SEQ ID NO: 2685 - DNA, 20 bp, synthetic construct
  source 1..20: mol_type = other DNA
tgtacgcacacatatccaca

SEQ ID NO: 2686 - DNA, 20 bp, synthetic construct
  source 1..20: mol_type = other DNA
aatggctggcattcattaag

SEQ ID NO: 2687 - DNA, 20 bp, synthetic construct
  source 1..20: mol_type = other DNA
ctttccacaacagacgctgg

SEQ ID NO: 2688 - DNA, 20 bp, synthetic construct
  source 1..20: mol_type = other DNA
tgtgaagtctgtccatgtgc

SEQ ID NO: 2689 - DNA, 20 bp, synthetic construct
  source 1..20: mol_type = other DNA
gttcttgggctgcttggctt

SEQ ID NO: 2690 - DNA, 20 bp, synthetic construct
  source 1..20: mol_type = other DNA
gagatagaatcacagcttga

SEQ ID NO: 2691 - DNA, 20 bp, synthetic construct
  source 1..20: mol_type = other DNA
aggtgaagtcattgaagaag

SEQ ID NO: 2692 - DNA, 20 bp, synthetic construct
  source 1..20: mol_type = other DNA
tcacactgtcgcagacccag

SEQ ID NO: 2693 - DNA, 20 bp, synthetic construct
  source 1..20: mol_type = other DNA
taggccaggtgacacaattt

SEQ ID NO: 2694 - DNA, 20 bp, synthetic construct
  source 1..20: mol_type = other DNA
ctcccaaaaattggttggtt

SEQ ID NO: 2695 - DNA, 20 bp, synthetic construct
  source 1..20: mol_type = other DNA
agagctgtcatcttgagctt

SEQ ID NO: 2696 - DNA, 20 bp, synthetic construct
  source 1..20: mol_type = other DNA
cgacgacttgagctcggcca

SEQ ID NO: 2697 - DNA, 20 bp, synthetic construct
  source 1..20: mol_type = other DNA
tgcagctgtcccagacaaag

SEQ ID NO: 2698 - DNA, 20 bp, synthetic construct
  source 1..20: mol_type = other DNA
ccctttcggtgttgatgaag

SEQ ID NO: 2699 - DNA, 20 bp, synthetic construct
  source 1..20: mol_type = other DNA
agctgggttgtaatggaatg

SEQ ID NO: 2700 - DNA, 20 bp, synthetic construct
  source 1..20: mol_type = other DNA
ctctctgtgagagttcaggg

SEQ ID NO: 2701 - DNA, 20 bp, synthetic construct
  source 1..20: mol_type = other DNA
tgttctcccactaggtatct

SEQ ID NO: 2702 - DNA, 20 bp, synthetic construct
  source 1..20: mol_type = other DNA
tgcccttaacatcatcagct

SEQ ID NO: 2703 - DNA, 20 bp, synthetic construct
  source 1..20: mol_type = other DNA
cagaaaacgatgtcgcagaa

SEQ ID NO: 2704 - DNA, 20 bp, synthetic construct
  source 1..20: mol_type = other DNA
tacatagaccaaactccaca

SEQ ID NO: 2705 - DNA, 20 bp, synthetic construct
  source 1..20: mol_type = other DNA
agatggataactgctagcca

SEQ ID NO: 2706 - DNA, 20 bp, synthetic construct
  source 1..20: mol_type = other DNA
tagctagccgagacatttta

SEQ ID NO: 2707 - DNA, 20 bp, synthetic construct
  source 1..20: mol_type = other DNA
aggcaagtatgttcctttgc

SEQ ID NO: 2708 - DNA, 20 bp, synthetic construct
  source 1..20: mol_type = other DNA
ggcggaaatctgagagtgca

SEQ ID NO: 2709 - DNA, 20 bp, synthetic construct
  source 1..20: mol_type = other DNA
ccctgctgatgagatggcat

SEQ ID NO: 2710 - DNA, 20 bp, synthetic construct
  source 1..20: mol_type = other DNA
cgttcctgtaaactgcagat

SEQ ID NO: 2711 - DNA, 20 bp, synthetic construct
  source 1..20: mol_type = other DNA
agggagagaaaaagccctgt

SEQ ID NO: 2712 - DNA, 20 bp, synthetic construct
  source 1..20: mol_type = other DNA
gcggcataacttacattcaa

SEQ ID NO: 2713 - DNA, 20 bp, synthetic construct
  source 1..20: mol_type = other DNA
caggagtaattgaatccctc

SEQ ID NO: 2714 - DNA, 20 bp, synthetic construct
  source 1..20: mol_type = other DNA
acggactcatctgtgcccag

SEQ ID NO: 2715 - DNA, 20 bp, synthetic construct
  source 1..20: mol_type = other DNA
aacgtctcctcatcggtccc

SEQ ID NO: 2716 - DNA, 20 bp, synthetic construct
  source 1..20: mol_type = other DNA
gtggtaaggatggtattgaa

SEQ ID NO: 2717 - DNA, 20 bp, synthetic construct
  source 1..20: mol_type = other DNA
aaaacaacctcctcaaggtg

SEQ ID NO: 2718 - DNA, 20 bp, synthetic construct
  source 1..20: mol_type = other DNA
gttagaagggcaaagttgac

SEQ ID NO: 2719 - DNA, 20 bp, synthetic construct
  source 1..20: mol_type = other DNA
agaattcagggtctctcctc

SEQ ID NO: 2720 - DNA, 20 bp, synthetic construct
  source 1..20: mol_type = other DNA
gctgttcctctgtatttgtt

SEQ ID NO: 2721 - DNA, 20 bp, synthetic construct
  source 1..20: mol_type = other DNA
aatcaatagggctccagcat

SEQ ID NO: 2722 - DNA, 20 bp, synthetic construct
  source 1..20: mol_type = other DNA
ggaggaaaaacaggcgggag

SEQ ID NO: 2723 - DNA, 20 bp, synthetic construct
  source 1..20: mol_type = other DNA
tcttgctgagtccgatctcg

SEQ ID NO: 2724 - DNA, 20 bp, synthetic construct
  source 1..20: mol_type = other DNA
cgcctgttggagtcctgcac

SEQ ID NO: 2725 - DNA, 20 bp, synthetic construct
  source 1..20: mol_type = other DNA
gactcccacttaaaagaagt

SEQ ID NO: 2726 - DNA, 20 bp, synthetic construct
  source 1..20: mol_type = other DNA
gcaactttaaggaggcgctt

SEQ ID NO: 2727 - DNA, 20 bp, synthetic construct
  source 1..20: mol_type = other DNA
ctccaacccgcggactccaa

SEQ ID NO: 2728 - DNA, 20 bp, synthetic construct
  source 1..20: mol_type = other DNA
taagtcatctccgttaacga

SEQ ID NO: 2729 - DNA, 20 bp, synthetic construct
  source 1..20: mol_type = other DNA
aggacaccgtcagccctaag

SEQ ID NO: 2730 - DNA, 20 bp, synthetic construct
  source 1..20: mol_type = other DNA
aatttcccaacgaatgccct

SEQ ID NO: 2731 - DNA, 20 bp, synthetic construct
  source 1..20: mol_type = other DNA
ggccagcttggtagaaggag

SEQ ID NO: 2732 - DNA, 20 bp, synthetic construct
  source 1..20: mol_type = other DNA
gtcgctgcagtgagagggtt

SEQ ID NO: 2733 - DNA, 20 bp, synthetic construct
  source 1..20: mol_type = other DNA
gtcagtggcattttccagaa

SEQ ID NO: 2734 - DNA, 20 bp, synthetic construct
  source 1..20: mol_type = other DNA
cgccgttgatcccggagacg

SEQ ID NO: 2735 - DNA, 20 bp, synthetic construct
  source 1..20: mol_type = other DNA
gtctcaggactctgacactg

SEQ ID NO: 2736 - DNA, 20 bp, synthetic construct
  source 1..20: mol_type = other DNA
catccttgtcctgtgagtat

SEQ ID NO: 2737 - DNA, 20 bp, synthetic construct
  source 1..20: mol_type = other DNA
aacttctaggaccatgggca

SEQ ID NO: 2738 - DNA, 20 bp, synthetic construct
  source 1..20: mol_type = other DNA
tgcaccacacagaactgatt

SEQ ID NO: 2739 - DNA, 20 bp, synthetic construct
  source 1..20: mol_type = other DNA
gagtctgctgggtcaaactg

SEQ ID NO: 2740 - DNA, 20 bp, synthetic construct
  source 1..20: mol_type = other DNA
accagccactgtgatggtcc

SEQ ID NO: 2741 - DNA, 20 bp, synthetic construct
  source 1..20: mol_type = other DNA
ctcagccaaatgtttgcctt

SEQ ID NO: 2742 - DNA, 20 bp, synthetic construct
  source 1..20: mol_type = other DNA
cgctttgctctcaggtgctc

SEQ ID NO: 2743 - DNA, 20 bp, synthetic construct
  source 1..20: mol_type = other DNA
aaaaggtggaaccatccact

SEQ ID NO: 2744 - DNA, 20 bp, synthetic construct
  source 1..20: mol_type = other DNA
agtgccatccacggctacag

SEQ ID NO: 2745 - DNA, 20 bp, synthetic construct
  source 1..20: mol_type = other DNA
ctttacatggtttgccacgg

SEQ ID NO: 2746 - DNA, 20 bp, synthetic construct
  source 1..20: mol_type = other DNA
taaccaaatcccatcagatc

SEQ ID NO: 2747 - DNA, 20 bp, synthetic construct
  source 1..20: mol_type = other DNA
ggagtcaaggtatcctactt

SEQ ID NO: 2748 - DNA, 20 bp, synthetic construct
  source 1..20: mol_type = other DNA
tcgttctactgatgtgggaa

SEQ ID NO: 2749 - DNA, 20 bp, synthetic construct
  source 1..20: mol_type = other DNA
aacaggaggatcagacagat

SEQ ID NO: 2750 - DNA, 20 bp, synthetic construct
  source 1..20: mol_type = other DNA
attggagtagctaggtttga

SEQ ID NO: 2751 - DNA, 20 bp, synthetic construct
  source 1..20: mol_type = other DNA
tacacctcaggagcttttct

SEQ ID NO: 2752 - DNA, 20 bp, synthetic construct
  source 1..20: mol_type = other DNA
tctcgaagcgctcacgccca

SEQ ID NO: 2753 - DNA, 20 bp, synthetic construct
  source 1..20: mol_type = other DNA
attcaggttgacaggtggga

SEQ ID NO: 2754 - DNA, 20 bp, synthetic construct
  source 1..20: mol_type = other DNA
aaagtagtacagcccaggaa

SEQ ID NO: 2755 - DNA, 20 bp, synthetic construct
  source 1..20: mol_type = other DNA
tgatcataggtgaagagcat

SEQ ID NO: 2756 - DNA, 20 bp, synthetic construct
  source 1..20: mol_type = other DNA
aagttcaagtctcgtggtct

SEQ ID NO: 2757 - DNA, 20 bp, synthetic construct
  source 1..20: mol_type = other DNA
tattcgagcggcgcgtccct

SEQ ID NO: 2758 - DNA, 20 bp, synthetic construct
  source 1..20: mol_type = other DNA
tcaagcagcacggtgttgga

SEQ ID NO: 2759 - DNA, 20 bp, synthetic construct
  source 1..20: mol_type = other DNA
tcgtgcacagagcgtagctc

SEQ ID NO: 2760 - DNA, 20 bp, synthetic construct
  source 1..20: mol_type = other DNA
attacggtagaatcccaggc

SEQ ID NO: 2761 - DNA, 20 bp, synthetic construct
  source 1..20: mol_type = other DNA
ggaatcagcctcgtggtcca

SEQ ID NO: 2762 - DNA, 20 bp, synthetic construct
  source 1..20: mol_type = other DNA
tcgctgctccatcttgtgct

SEQ ID NO: 2763 - DNA, 20 bp, synthetic construct
  source 1..20: mol_type = other DNA
ccctctcggactttcttccg

SEQ ID NO: 2764 - DNA, 20 bp, synthetic construct
  source 1..20: mol_type = other DNA
gcattagaatacctccaaac

SEQ ID NO: 2765 - DNA, 20 bp, synthetic construct
  source 1..20: mol_type = other DNA
tcaatgcaggctagaataga

SEQ ID NO: 2766 - DNA, 20 bp, synthetic construct
  source 1..20: mol_type = other DNA
tgggaaaagcatgatcagtg

SEQ ID NO: 2767 - DNA, 20 bp, synthetic construct
  source 1..20: mol_type = other DNA
tcatcaccgtcttcttggta

SEQ ID NO: 2768 - DNA, 20 bp, synthetic construct
  source 1..20: mol_type = other DNA
ccttaggcaacatcctcctg

SEQ ID NO: 2769 - DNA, 20 bp, synthetic construct
  source 1..20: mol_type = other DNA
caggatttttgtcaagctgc

SEQ ID NO: 2770 - DNA, 20 bp, synthetic construct
  source 1..20: mol_type = other DNA
ggcttctaggtgccagtgac

SEQ ID NO: 2771 - DNA, 20 bp, synthetic construct
  source 1..20: mol_type = other DNA
gctcaaggacgtctgtgaag

SEQ ID NO: 2772 - DNA, 20 bp, synthetic construct
  source 1..20: mol_type = other DNA
aaggctggattaacacgctg

SEQ ID NO: 2773 - DNA, 20 bp, synthetic construct
  source 1..20: mol_type = other DNA
tagcaatctgtgctgagttt

SEQ ID NO: 2774 - DNA, 20 bp, synthetic construct
  source 1..20: mol_type = other DNA
aggattctccaagccggcag

SEQ ID NO: 2775 - DNA, 20 bp, synthetic construct
  source 1..20: mol_type = other DNA
gcgttgcgctggcacactgg

SEQ ID NO: 2776 - DNA, 20 bp, synthetic construct
  source 1..20: mol_type = other DNA
cggatgctgcccacagcgtt

SEQ ID NO: 2777 - DNA, 20 bp, synthetic construct
  source 1..20: mol_type = other DNA
ttgataattgacctgtacgc

SEQ ID NO: 2778 - DNA, 20 bp, synthetic construct
  source 1..20: mol_type = other DNA
catcctgctttcttgaaaag

SEQ ID NO: 2779 - DNA, 20 bp, synthetic construct
  source 1..20: mol_type = other DNA
agcagtgacatgaaggtagc

SEQ ID NO: 2780 - DNA, 20 bp, synthetic construct
  source 1..20: mol_type = other DNA
ataggacagctcaaggacag

SEQ ID NO: 2781 - DNA, 20 bp, synthetic construct
  source 1..20: mol_type = other DNA
gctccaaggtcaggaagtcc

SEQ ID NO: 2782 - DNA, 20 bp, synthetic construct
  source 1..20: mol_type = other DNA
gggtcatacacacagacatg

SEQ ID NO: 2783 - DNA, 20 bp, synthetic construct
  source 1..20: mol_type = other DNA
agtgcacgcagcaacacagg

SEQ ID NO: 2784 - DNA, 20 bp, synthetic construct
  source 1..20: mol_type = other DNA
atcttctgcttcggaggcaa

SEQ ID NO: 2785 - DNA, 20 bp, synthetic construct
  source 1..20: mol_type = other DNA
aatgtcaacatgcccaactg

SEQ ID NO: 2786 - DNA, 20 bp, synthetic construct
  source 1..20: mol_type = other DNA
atttcacaaataccgcaggt

SEQ ID NO: 2787 - DNA, 20 bp, synthetic construct
  source 1..20: mol_type = other DNA
ccaccaatatatgctgtgaa

SEQ ID NO: 2788 - DNA, 20 bp, synthetic construct
  source 1..20: mol_type = other DNA
gggcagttacattctggtgc

SEQ ID NO: 2789 - DNA, 20 bp, synthetic construct
  source 1..20: mol_type = other DNA
gagagtcatgaggactgtgg

SEQ ID NO: 2790 - DNA, 20 bp, synthetic construct
  source 1..20: mol_type = other DNA
gtaaaagggaaggccttcac

SEQ ID NO: 2791 - DNA, 20 bp, synthetic construct
  source 1..20: mol_type = other DNA
gaagaaattgcttgcttcca

SEQ ID NO: 2792 - DNA, 20 bp, synthetic construct
  source 1..20: mol_type = other DNA
gcaccagccacactgaacaa

SEQ ID NO: 2793 - DNA, 20 bp, synthetic construct
  source 1..20: mol_type = other DNA
ggtttgtgggccgatgggct

SEQ ID NO: 2794 - DNA, 20 bp, synthetic construct
  source 1..20: mol_type = other DNA
tccaggaaagtcatgtgcta

SEQ ID NO: 2795 - DNA, 20 bp, synthetic construct
  source 1..20: mol_type = other DNA
tgggctgctattgaaaccac

SEQ ID NO: 2796 - DNA, 20 bp, synthetic construct
  source 1..20: mol_type = other DNA
ctgagagactctttctccat

SEQ ID NO: 2797 - DNA, 20 bp, synthetic construct
  source 1..20: mol_type = other DNA
ccgattcggagtacagttcc

SEQ ID NO: 2798 - DNA, 20 bp, synthetic construct
  source 1..20: mol_type = other DNA
gcccatttttccctctgccc

SEQ ID NO: 2799 - DNA, 20 bp, synthetic construct
  source 1..20: mol_type = other DNA
ttaagtcactaatcctctcc

SEQ ID NO: 2800 - DNA, 20 bp, synthetic construct
  source 1..20: mol_type = other DNA
agacaacgttctggaaaagg

SEQ ID NO: 2801 - DNA, 20 bp, synthetic construct
  source 1..20: mol_type = other DNA
attgatgtggacatctctga

SEQ ID NO: 2802 - DNA, 20 bp, synthetic construct
  source 1..20: mol_type = other DNA
tcgcgctctcggtcaccctg

SEQ ID NO: 2803 - DNA, 20 bp, synthetic construct
  source 1..20: mol_type = other DNA
gggtactgccagctcacttc

SEQ ID NO: 2804 - DNA, 20 bp, synthetic construct
  source 1..20: mol_type = other DNA
cccgtgtctagcccagtgag

SEQ ID NO: 2805 - DNA, 20 bp, synthetic construct
  source 1..20: mol_type = other DNA
cttgcttcatctggacaaat

SEQ ID NO: 2806 - DNA, 20 bp, synthetic construct
  source 1..20: mol_type = other DNA
tcaactgttgcccgcattgc

SEQ ID NO: 2807 - DNA, 20 bp, synthetic construct
  source 1..20: mol_type = other DNA
atagatccggacttcaggaa

SEQ ID NO: 2808 - DNA, 20 bp, synthetic construct
  source 1..20: mol_type = other DNA
atggtgctagtcctatccca

SEQ ID NO: 2809 - DNA, 20 bp, synthetic construct
  source 1..20: mol_type = other DNA
cgccggagaaacccgagctc

SEQ ID NO: 2810 - DNA, 20 bp, synthetic construct
  source 1..20: mol_type = other DNA
cattgcacacagaggccacc

SEQ ID NO: 2811 - DNA, 20 bp, synthetic construct
  source 1..20: mol_type = other DNA
atcaaaaagagcgagtggga

SEQ ID NO: 2812 - DNA, 20 bp, synthetic construct
  source 1..20: mol_type = other DNA
taccagttcttacaagtgct

SEQ ID NO: 2813 - DNA, 20 bp, synthetic construct
  source 1..20: mol_type = other DNA
actttaagaggtttgccagg

SEQ ID NO: 2814 - DNA, 20 bp, synthetic construct
  source 1..20: mol_type = other DNA
ggaacgtggagaggaggagg

SEQ ID NO: 2815 - DNA, 20 bp, synthetic construct
  source 1..20: mol_type = other DNA
ctagggagaacagtttcaat

SEQ ID NO: 2816 - DNA, 20 bp, synthetic construct
  source 1..20: mol_type = other DNA
gctctgggatttctttgctg

SEQ ID NO: 2817 - DNA, 20 bp, synthetic construct
  source 1..20: mol_type = other DNA
gataagcagccagaagccag

SEQ ID NO: 2818 - DNA, 20 bp, synthetic construct
  source 1..20: mol_type = other DNA
aataccggacacaggttccc

SEQ ID NO: 2819 - DNA, 20 bp, synthetic construct
  source 1..20: mol_type = other DNA
gagacaacacacaaactaag

SEQ ID NO: 2820 - DNA, 20 bp, synthetic construct
  source 1..20: mol_type = other DNA
taccaagggaatgttggact

SEQ ID NO: 2821 - DNA, 20 bp, synthetic construct
  source 1..20: mol_type = other DNA
tacaggttgtgttccatggg

SEQ ID NO: 2822 - DNA, 20 bp, synthetic construct
  source 1..20: mol_type = other DNA
gtgaatatgagacaagcttc

SEQ ID NO: 2823 - DNA, 20 bp, synthetic construct
  source 1..20: mol_type = other DNA
tatcagtctagttctgtcct

SEQ ID NO: 2824 - DNA, 20 bp, synthetic construct
  source 1..20: mol_type = other DNA
cgtggctgatctcaccaatg

SEQ ID NO: 2825 - DNA, 20 bp, synthetic construct
  source 1..20: mol_type = other DNA
tatcacactgtaagtggtcc

SEQ ID NO: 2826 - DNA, 20 bp, synthetic construct
  source 1..20: mol_type = other DNA
tggtcgccatcttgtaaaca

SEQ ID NO: 2827 - DNA, 20 bp, synthetic construct
  source 1..20: mol_type = other DNA
aactagtgtgagttctggga

SEQ ID NO: 2828 - DNA, 20 bp, synthetic construct
  source 1..20: mol_type = other DNA
cacgacacaatcctctgtct

SEQ ID NO: 2829 - DNA, 20 bp, synthetic construct
  source 1..20: mol_type = other DNA
aaggcggataagtagaggac

SEQ ID NO: 2830 - DNA, 20 bp, synthetic construct
  source 1..20: mol_type = other DNA
agatctgaggcctttaagaa

SEQ ID NO: 2831 - DNA, 20 bp, synthetic construct
  source 1..20: mol_type = other DNA
tccatcttcataggcagcaa

SEQ ID NO: 2832 - DNA, 20 bp, synthetic construct
  source 1..20: mol_type = other DNA
gggagaacggaatccataag

SEQ ID NO: 2833 - DNA, 20 bp, synthetic construct
  source 1..20: mol_type = other DNA
caggtcttggtattcacgaa

SEQ ID NO: 2834 - DNA, 20 bp, synthetic construct
  source 1..20: mol_type = other DNA
tggttagctggtccacctgc

SEQ ID NO: 2835 - DNA, 20 bp, synthetic construct
  source 1..20: mol_type = other DNA
cacgttaaatacatcctgga

SEQ ID NO: 2836 - DNA, 20 bp, synthetic construct
  source 1..20: mol_type = other DNA
ccaggacccatatttcttgg

SEQ ID NO: 2837 - DNA, 20 bp, synthetic construct
  source 1..20: mol_type = other DNA
tctatgctgatacaagccag

SEQ ID NO: 2838 - DNA, 20 bp, synthetic construct
  source 1..20: mol_type = other DNA
tgtagttgaaggttgccttt

SEQ ID NO: 2839 - DNA, 20 bp, synthetic construct
  source 1..20: mol_type = other DNA
ctagcctttctctactgaac

SEQ ID NO: 2840 - DNA, 20 bp, synthetic construct
  source 1..20: mol_type = other DNA
caaagcccaagagttcttgg

SEQ ID NO: 2841 - DNA, 20 bp, synthetic construct
  source 1..20: mol_type = other DNA
ggtttatgaggcttgtccct

SEQ ID NO: 2842 - DNA, 20 bp, synthetic construct
  source 1..20: mol_type = other DNA
gcccttcaaggagcgggtgg

SEQ ID NO: 2843 - DNA, 20 bp, synthetic construct
  source 1..20: mol_type = other DNA
gatgtggacagcatgttgtg

SEQ ID NO: 2844 - DNA, 20 bp, synthetic construct
  source 1..20: mol_type = other DNA
acataggctaatgtgcccac

SEQ ID NO: 2845 - DNA, 20 bp, synthetic construct
  source 1..20: mol_type = other DNA
ctgagcttgctcgctcggga

SEQ ID NO: 2846 - DNA, 20 bp, synthetic construct
  source 1..20: mol_type = other DNA
tttggaagaagactaagagg

SEQ ID NO: 2847 - DNA, 20 bp, synthetic construct
  source 1..20: mol_type = other DNA
agttgcgtgcctggagcagg

SEQ ID NO: 2848 - DNA, 20 bp, synthetic construct
  source 1..20: mol_type = other DNA
gctctagttctggtctgagc

SEQ ID NO: 2849 - DNA, 20 bp, synthetic construct
  source 1..20: mol_type = other DNA
agcggaaatcttcatcgtcc

SEQ ID NO: 2850 - DNA, 20 bp, synthetic construct
  source 1..20: mol_type = other DNA
ttacggtggcgcgcagcgag

SEQ ID NO: 2851 - DNA, 20 bp, synthetic construct
  source 1..20: mol_type = other DNA
agccagatgtgtccaaatcc

SEQ ID NO: 2852 - DNA, 20 bp, synthetic construct
  source 1..20: mol_type = other DNA
cccaagctccattgtaaaaa

SEQ ID NO: 2853 - DNA, 20 bp, synthetic construct
  source 1..20: mol_type = other DNA
ggctcatgagcttcccggaa

SEQ ID NO: 2854 - DNA, 20 bp, synthetic construct
  source 1..20: mol_type = other DNA
gactacaaacaggtatgagg

SEQ ID NO: 2855 - DNA, 20 bp, synthetic construct
  source 1..20: mol_type = other DNA
ccaaagaggtagaaacgaaa

SEQ ID NO: 2856 - DNA, 20 bp, synthetic construct
  source 1..20: mol_type = other DNA
taggcctccgccatcttatc

SEQ ID NO: 2857 - DNA, 20 bp, synthetic construct
  source 1..20: mol_type = other DNA
tgtctcataatctgggcgtc

SEQ ID NO: 2858 - DNA, 20 bp, synthetic construct
  source 1..20: mol_type = other DNA
tgctcagccacaattcttgc

SEQ ID NO: 2859 - DNA, 20 bp, synthetic construct
  source 1..20: mol_type = other DNA
tgaatggcttggaggatgaa

SEQ ID NO: 2860 - DNA, 20 bp, synthetic construct
  source 1..20: mol_type = other DNA
tcccggatgctcacgaagca

SEQ ID NO: 2861 - DNA, 20 bp, synthetic construct
  source 1..20: mol_type = other DNA
gtccttcacgaggaatgttc

SEQ ID NO: 2862 - DNA, 20 bp, synthetic construct
  source 1..20: mol_type = other DNA
taaggaggaggatacataac

SEQ ID NO: 2863 - DNA, 20 bp, synthetic construct
  source 1..20: mol_type = other DNA
cctcatttgaccaaatccct

SEQ ID NO: 2864 - DNA, 20 bp, synthetic construct
  source 1..20: mol_type = other DNA
aaatagcacccacactgaaa

SEQ ID NO: 2865 - DNA, 20 bp, synthetic construct
  source 1..20: mol_type = other DNA
gggcaagtgtccaccagggc

SEQ ID NO: 2866 - DNA, 20 bp, synthetic construct
  source 1..20: mol_type = other DNA
agacaataagctcagttctg

SEQ ID NO: 2867 - DNA, 20 bp, synthetic construct
  source 1..20: mol_type = other DNA
ggacttcttatacctacttc

SEQ ID NO: 2868 - DNA, 20 bp, synthetic construct
  source 1..20: mol_type = other DNA
tgatgtatagggtttagtgg

SEQ ID NO: 2869 - DNA, 20 bp, synthetic construct
  source 1..20: mol_type = other DNA
agcctagaaaagctcatctt

SEQ ID NO: 2870 - DNA, 20 bp, synthetic construct
  source 1..20: mol_type = other DNA
atcaccacttctctgggcag

SEQ ID NO: 2871 - DNA, 20 bp, synthetic construct
  source 1..20: mol_type = other DNA
accaaagtggaaaggatctt

SEQ ID NO: 2872 - DNA, 20 bp, synthetic construct
  source 1..20: mol_type = other DNA
gactggagtcaacaagtagc

SEQ ID NO: 2873 - DNA, 20 bp, synthetic construct
  source 1..20: mol_type = other DNA
taactgaggagccaattcaa

SEQ ID NO: 2874 - DNA, 20 bp, synthetic construct
  source 1..20: mol_type = other DNA
tgcaaatgaccatccagtgg

SEQ ID NO: 2875 - DNA, 20 bp, synthetic construct
  source 1..20: mol_type = other DNA
ttagacgttctagagcctgg

SEQ ID NO: 2876 - DNA, 20 bp, synthetic construct
  source 1..20: mol_type = other DNA
tggaacagaaggtgacttgg

SEQ ID NO: 2877 - DNA, 20 bp, synthetic construct
  source 1..20: mol_type = other DNA
gctgtagcgaccatttttct

SEQ ID NO: 2878 - DNA, 20 bp, synthetic construct
  source 1..20: mol_type = other DNA
gctgtcggtgatccagggac

SEQ ID NO: 2879 - DNA, 20 bp, synthetic construct
  source 1..20: mol_type = other DNA
atcgtttcaccttctctggt

SEQ ID NO: 2880 - DNA, 20 bp, synthetic construct
  source 1..20: mol_type = other DNA
atgcctagcccaatgaaaag

SEQ ID NO: 2881 - DNA, 20 bp, synthetic construct
  source 1..20: mol_type = other DNA
aaactagagagcaacactca

SEQ ID NO: 2882 - DNA, 20 bp, synthetic construct
  source 1..20: mol_type = other DNA
accaagcccgcgaccaatgg

SEQ ID NO: 2883 - DNA, 20 bp, synthetic construct
  source 1..20: mol_type = other DNA
gagataaggtcgcgctggtc

SEQ ID NO: 2884 - DNA, 20 bp, synthetic construct
  source 1..20: mol_type = other DNA
cgttgttgctgctattgtgc

SEQ ID NO: 2885 - DNA, 20 bp, synthetic construct
  source 1..20: mol_type = other DNA
tggatggtgatgttccctgc

SEQ ID NO: 2886 - DNA, 20 bp, synthetic construct
  source 1..20: mol_type = other DNA
ccttgcttctgcggacactg

SEQ ID NO: 2887 - DNA, 20 bp, synthetic construct
  source 1..20: mol_type = other DNA
gcttcttcttcttccatttc

SEQ ID NO: 2888 - DNA, 20 bp, synthetic construct
  source 1..20: mol_type = other DNA
tagtccctgttacagcagca

SEQ ID NO: 2889 - DNA, 20 bp, synthetic construct
  source 1..20: mol_type = other DNA
gtttgaagtaatgtagtggc

SEQ ID NO: 2890 - DNA, 20 bp, synthetic construct
  source 1..20: mol_type = other DNA
ccctttgtaaaacgggcggg

SEQ ID NO: 2891 - DNA, 20 bp, synthetic construct
  source 1..20: mol_type = other DNA
ttctcactgaacttgtgcaa

SEQ ID NO: 2892 - DNA, 20 bp, synthetic construct
  source 1..20: mol_type = other DNA
ctccaaatgagacttgggat

SEQ ID NO: 2893 - DNA, 20 bp, synthetic construct
  source 1..20: mol_type = other DNA
tttaatcatctgtgggcctt

SEQ ID NO: 2894 - DNA, 20 bp, synthetic construct
  source 1..20: mol_type = other DNA
ggctgagcacacgatctggg

SEQ ID NO: 2895 - DNA, 20 bp, synthetic construct
  source 1..20: mol_type = other DNA
gcccgtgcagatggaatcat

SEQ ID NO: 2896 - DNA, 20 bp, synthetic construct
  source 1..20: mol_type = other DNA
ctaaaacatagccatgtgag

SEQ ID NO: 2897 - DNA, 20 bp, synthetic construct
  source 1..20: mol_type = other DNA
aggtaaggatgctccttttc

SEQ ID NO: 2898 - DNA, 20 bp, synthetic construct
  source 1..20: mol_type = other DNA
ttttattctggttggctcag

SEQ ID NO: 2899 - DNA, 20 bp, synthetic construct
  source 1..20: mol_type = other DNA
gatgttgcatttcgtcacac

SEQ ID NO: 2900 - DNA, 20 bp, synthetic construct
  source 1..20: mol_type = other DNA
tggaaatccctggtcctgtc

SEQ ID NO: 2901 - DNA, 20 bp, synthetic construct
  source 1..20: mol_type = other DNA
tcgccattataatagcgggc

SEQ ID NO: 2902 - DNA, 20 bp, synthetic construct
  source 1..20: mol_type = other DNA
gaatccgtgggagatggagt

SEQ ID NO: 2903 - DNA, 20 bp, synthetic construct
  source 1..20: mol_type = other DNA
gcatcgctccgctaggtgtc

SEQ ID NO: 2904 - DNA, 20 bp, synthetic construct
  source 1..20: mol_type = other DNA
tccatacctagcaggctgtc

SEQ ID NO: 2905 - DNA, 20 bp, synthetic construct
  source 1..20: mol_type = other DNA
ttggttttcctttctgtgct

SEQ ID NO: 2906 - DNA, 20 bp, synthetic construct
  source 1..20: mol_type = other DNA
cgaatggcctggcactggat

SEQ ID NO: 2907 - DNA, 20 bp, synthetic construct
  source 1..20: mol_type = other DNA
gctgatggtagctgtagact

SEQ ID NO: 2908 - DNA, 20 bp, synthetic construct
  source 1..20: mol_type = other DNA
cattggtccggtcttctcct

SEQ ID NO: 2909 - DNA, 20 bp, synthetic construct
  source 1..20: mol_type = other DNA
gatatgagtcagaatggctt

SEQ ID NO: 2910 - DNA, 20 bp, synthetic construct
  source 1..20: mol_type = other DNA
ccacagtcaaggaaaccagc

SEQ ID NO: 2911 - DNA, 20 bp, synthetic construct
  source 1..20: mol_type = other DNA
ggctcagacgagagaagacc

SEQ ID NO: 2912 - DNA, 20 bp, synthetic construct
  source 1..20: mol_type = other DNA
gagttggagatgggaaagtg

SEQ ID NO: 2913 - DNA, 20 bp, synthetic construct
  source 1..20: mol_type = other DNA
ccttttgcatgttcaatcct

SEQ ID NO: 2914 - DNA, 20 bp, synthetic construct
  source 1..20: mol_type = other DNA
cccaagaatgacctgggacc

SEQ ID NO: 2915 - DNA, 20 bp, synthetic construct
  source 1..20: mol_type = other DNA
ataagataagccatgtaggg

SEQ ID NO: 2916 - DNA, 20 bp, synthetic construct
  source 1..20: mol_type = other DNA
ggcgcttcattgttctcttt

SEQ ID NO: 2917 - DNA, 20 bp, synthetic construct
  source 1..20: mol_type = other DNA
gaaggtggtaccattactgt

SEQ ID NO: 2918 - DNA, 20 bp, synthetic construct
  source 1..20: mol_type = other DNA
ggttgcttttgatccaagtc

SEQ ID NO: 2919 - DNA, 20 bp, synthetic construct
  source 1..20: mol_type = other DNA
ctgcatttgccaatcctgag

SEQ ID NO: 2920 - DNA, 20 bp, synthetic construct
  source 1..20: mol_type = other DNA
cccagttttccctagtttat

SEQ ID NO: 2921 - DNA, 20 bp, synthetic construct
  source 1..20: mol_type = other DNA
caggattcagatagaactcg

SEQ ID NO: 2922 - DNA, 20 bp, synthetic construct
  source 1..20: mol_type = other DNA
aaaggtggtcttccctgggc

SEQ ID NO: 2923 - DNA, 20 bp, synthetic construct
  source 1..20: mol_type = other DNA
gcaggcaatcaccattcaat

SEQ ID NO: 2924 - DNA, 20 bp, synthetic construct
  source 1..20: mol_type = other DNA
caccagaccgtctgatagct

SEQ ID NO: 2925 - DNA, 20 bp, synthetic construct
  source 1..20: mol_type = other DNA
aacagcatctgactcctttt

SEQ ID NO: 2926 - DNA, 20 bp, synthetic construct
  source 1..20: mol_type = other DNA
gtgtagtcatcgctgttctc

SEQ ID NO: 2927 - DNA, 20 bp, synthetic construct
  source 1..20: mol_type = other DNA
ggaattctcacaggagacga

SEQ ID NO: 2928 - DNA, 20 bp, synthetic construct
  source 1..20: mol_type = other DNA
gtgcccagactgcctcgtgc

SEQ ID NO: 2929 - DNA, 20 bp, synthetic construct
  source 1..20: mol_type = other DNA
cttgttacttcgggaagcga

SEQ ID NO: 2930 - DNA, 20 bp, synthetic construct
  source 1..20: mol_type = other DNA
ttcacagagaagctcagtaa

SEQ ID NO: 2931 - DNA, 20 bp, synthetic construct
  source 1..20: mol_type = other DNA
tagatgcctttctcttggag

SEQ ID NO: 2932 - DNA, 20 bp, synthetic construct
  source 1..20: mol_type = other DNA
tgttcaggttgaccatcaca

SEQ ID NO: 2933 - DNA, 20 bp, synthetic construct
  source 1..20: mol_type = other DNA
agtatgaaaaccttagtcgg

SEQ ID NO: 2934 - DNA, 20 bp, synthetic construct
  source 1..20: mol_type = other DNA
actaccctaaggcaggcagt

SEQ ID NO: 2935 - DNA, 20 bp, synthetic construct
  source 1..20: mol_type = other DNA
catgacggctacgttcatgt

SEQ ID NO: 2936 - DNA, 20 bp, synthetic construct
  source 1..20: mol_type = other DNA
gttccttccttgtaggccat

SEQ ID NO: 2937 - DNA, 20 bp, synthetic construct
  source 1..20: mol_type = other DNA
acccaagactcagacaacct

SEQ ID NO: 2938 - DNA, 20 bp, synthetic construct
  source 1..20: mol_type = other DNA
ctcaacgcttgtggagcctt

SEQ ID NO: 2939 - DNA, 20 bp, synthetic construct
  source 1..20: mol_type = other DNA
gggtggttattgcatctaga

SEQ ID NO: 2940 - DNA, 20 bp, synthetic construct
  source 1..20: mol_type = other DNA
tcttattgggtcaagctggt

SEQ ID NO: 2941 - DNA, 20 bp, synthetic construct
  source 1..20: mol_type = other DNA
ctgggtcctcaaaagcacag

SEQ ID NO: 2942 - DNA, 20 bp, synthetic construct
  source 1..20: mol_type = other DNA
tactagtgacgtttggcact

SEQ ID NO: 2943 - DNA, 20 bp, synthetic construct
  source 1..20: mol_type = other DNA
gctggacttcgactttcttt

SEQ ID NO: 2944 - DNA, 20 bp, synthetic construct
  source 1..20: mol_type = other DNA
atatagaaagactccaccag

SEQ ID NO: 2945 - DNA, 20 bp, synthetic construct
  source 1..20: mol_type = other DNA
catcagtggcaaacaccagc

SEQ ID NO: 2946 - DNA, 20 bp, synthetic construct
  source 1..20: mol_type = other DNA
ggcccttttcgaacttcagg

SEQ ID NO: 2947 - DNA, 20 bp, synthetic construct
  source 1..20: mol_type = other DNA
acctctttcaggtgagcatg

SEQ ID NO: 2948 - DNA, 20 bp, synthetic construct
  source 1..20: mol_type = other DNA
ttggacacagacacaacagg

SEQ ID NO: 2949 - DNA, 20 bp, synthetic construct
  source 1..20: mol_type = other DNA
tgactcggatagccctccca

SEQ ID NO: 2950 - DNA, 20 bp, synthetic construct
  source 1..20: mol_type = other DNA
ttgcaccggtacccaaccca

SEQ ID NO: 2951 - DNA, 20 bp, synthetic construct
  source 1..20: mol_type = other DNA
tctgtctattcataccaggt

SEQ ID NO: 2952 - DNA, 20 bp, synthetic construct
  source 1..20: mol_type = other DNA
cgtataccaaaggccttagt

SEQ ID NO: 2953 - DNA, 20 bp, synthetic construct
  source 1..20: mol_type = other DNA
caaagcgttcttgtccagat

SEQ ID NO: 2954 - DNA, 20 bp, synthetic construct
  source 1..20: mol_type = other DNA
tgtgtgggttgaatgtcaac

SEQ ID NO: 2955 - DNA, 20 bp, synthetic construct
  source 1..20: mol_type = other DNA
tccgtggaacacaactcaga

SEQ ID NO: 2956 - DNA, 20 bp, synthetic construct
  source 1..20: mol_type = other DNA
gtatcatccatccattttcc

SEQ ID NO: 2957 - DNA, 20 bp, synthetic construct
  source 1..20: mol_type = other DNA
tccagtagccatcaagatcc

SEQ ID NO: 2958 - DNA, 20 bp, synthetic construct
  source 1..20: mol_type = other DNA
gctattacaagttcctggaa

SEQ ID NO: 2959 - DNA, 20 bp, synthetic construct
  source 1..20: mol_type = other DNA
tggtggcattttctatggtc

SEQ ID NO: 2960 - DNA, 20 bp, synthetic construct
  source 1..20: mol_type = other DNA
caccagggtgacggactggc

SEQ ID NO: 2961 - DNA, 20 bp, synthetic construct
  source 1..20: mol_type = other DNA
ggaggccgcgctgatctcac

SEQ ID NO: 2962 - DNA, 20 bp, synthetic construct
  source 1..20: mol_type = other DNA
cataatttccctggcaacag

SEQ ID NO: 2963 - DNA, 20 bp, synthetic construct
  source 1..20: mol_type = other DNA
acatatgaggatgggtaaca

SEQ ID NO: 2964 - DNA, 20 bp, synthetic construct
  source 1..20: mol_type = other DNA
tcacttagaaaacttgaggg

SEQ ID NO: 2965 - DNA, 20 bp, synthetic construct
  source 1..20: mol_type = other DNA
actcgatgcagcgcaggaag

SEQ ID NO: 2966 - DNA, 20 bp, synthetic construct
  source 1..20: mol_type = other DNA
gccatcaagtggccacgaca

SEQ ID NO: 2967 - DNA, 20 bp, synthetic construct
  source 1..20: mol_type = other DNA
gacattcaattgccatgagg

SEQ ID NO: 2968 - DNA, 20 bp, synthetic construct
  source 1..20: mol_type = other DNA
ctgaacaggtgtggtggcag

SEQ ID NO: 2969 - DNA, 20 bp, synthetic construct
  source 1..20: mol_type = other DNA
aagcagattccttggtaagg

SEQ ID NO: 2970 - DNA, 20 bp, synthetic construct
  source 1..20: mol_type = other DNA
ctcttgggtttccctggatt

SEQ ID NO: 2971 - DNA, 20 bp, synthetic construct
  source 1..20: mol_type = other DNA
gttgttattgtcccacacgg

SEQ ID NO: 2972 - DNA, 20 bp, synthetic construct
  source 1..20: mol_type = other DNA
tggagataagcctgaggtag

SEQ ID NO: 2973 - DNA, 20 bp, synthetic construct
  source 1..20: mol_type = other DNA
tcacaacgttccaaaatccc

SEQ ID NO: 2974 - DNA, 20 bp, synthetic construct
  source 1..20: mol_type = other DNA
acatcgcatactctgttgtg

SEQ ID NO: 2975 - DNA, 20 bp, synthetic construct
  source 1..20: mol_type = other DNA
catgactgccactggaatga

SEQ ID NO: 2976 - DNA, 20 bp, synthetic construct
  source 1..20: mol_type = other DNA
acgacgtgaaatttgatctg

SEQ ID NO: 2977 - DNA, 20 bp, synthetic construct
  source 1..20: mol_type = other DNA
atttctgttccaattcctcc

SEQ ID NO: 2978 - DNA, 20 bp, synthetic construct
  source 1..20: mol_type = other DNA
gacgccggtcttgatgacga

SEQ ID NO: 2979 - DNA, 20 bp, synthetic construct
  source 1..20: mol_type = other DNA
agatggctttcactgaatct

SEQ ID NO: 2980 - DNA, 20 bp, synthetic construct
  source 1..20: mol_type = other DNA
ttggaaatcatcaccacagg

SEQ ID NO: 2981 - DNA, 20 bp, synthetic construct
  source 1..20: mol_type = other DNA
ttctcactcagagaatcact

SEQ ID NO: 2982 - DNA, 20 bp, synthetic construct
  source 1..20: mol_type = other DNA
gcggtttgggtaggcaaagg

SEQ ID NO: 2983 - DNA, 20 bp, synthetic construct
  source 1..20: mol_type = other DNA
aaagatatgcgtgttggaag

SEQ ID NO: 2984 - DNA, 20 bp, synthetic construct
  source 1..20: mol_type = other DNA
tccttcatgcccaagacttt

SEQ ID NO: 2985 - DNA, 20 bp, synthetic construct
  source 1..20: mol_type = other DNA
gctgtgttctcacaagttca

SEQ ID NO: 2986 - DNA, 20 bp, synthetic construct
  source 1..20: mol_type = other DNA
cgtgggcaagccaagggttc

SEQ ID NO: 2987 - DNA, 20 bp, synthetic construct
  source 1..20: mol_type = other DNA
cgcgatctggtaccagaagg

SEQ ID NO: 2988 - DNA, 20 bp, synthetic construct
  source 1..20: mol_type = other DNA
gcaggtggatagtcccgcgg

SEQ ID NO: 2989 - DNA, 20 bp, synthetic construct
  source 1..20: mol_type = other DNA
ctttctctgcagaaatgttc

SEQ ID NO: 2990 - DNA, 20 bp, synthetic construct
  source 1..20: mol_type = other DNA
tagatcaaggcccaaatgct

SEQ ID NO: 2991 - DNA, 20 bp, synthetic construct
  source 1..20: mol_type = other DNA
aaatatgggaacctaggact

SEQ ID NO: 2992 - DNA, 20 bp, synthetic construct
  source 1..20: mol_type = other DNA
tttacccaaaatccttcccg

SEQ ID NO: 2993 - DNA, 20 bp, synthetic construct
  source 1..20: mol_type = other DNA
cttagcataaggcctgacat

SEQ ID NO: 2994 - DNA, 20 bp, synthetic construct
  source 1..20: mol_type = other DNA
ccattgaagatgccattgaa

SEQ ID NO: 2995 - DNA, 20 bp, synthetic construct
  source 1..20: mol_type = other DNA
tccaccgtgtactcgaggcc

SEQ ID NO: 2996 - DNA, 20 bp, synthetic construct
  source 1..20: mol_type = other DNA
agcgtgaggaagaacagcag

SEQ ID NO: 2997 - DNA, 20 bp, synthetic construct
  source 1..20: mol_type = other DNA
gatatcgagagctgttacaa

SEQ ID NO: 2998 - DNA, 20 bp, synthetic construct
  source 1..20: mol_type = other DNA
actccacttatcgcttcttc

SEQ ID NO: 2999 - DNA, 20 bp, synthetic construct
  source 1..20: mol_type = other DNA
actacatggcagggcttggc

SEQ ID NO: 3000 - DNA, 20 bp, synthetic construct
  source 1..20: mol_type = other DNA
aatagtagggcgattacaga

SEQ ID NO: 3001 - DNA, 20 bp, synthetic construct
  source 1..20: mol_type = other DNA
aggtgctgtagattcccatt

SEQ ID NO: 3002 - DNA, 20 bp, synthetic construct
  source 1..20: mol_type = other DNA
gttacttccaaactcttggt

SEQ ID NO: 3003 - DNA, 20 bp, synthetic construct
  source 1..20: mol_type = other DNA
acatttacacgtctgcggat

SEQ ID NO: 3004 - DNA, 20 bp, synthetic construct
  source 1..20: mol_type = other DNA
tacctgtgatctgtctttct

SEQ ID NO: 3005 - DNA, 20 bp, synthetic construct
  source 1..20: mol_type = other DNA
taatctaccacaaagttgcg

SEQ ID NO: 3006 - DNA, 20 bp, synthetic construct
  source 1..20: mol_type = other DNA
taatcctggcaggacaagga

SEQ ID NO: 3007 - DNA, 20 bp, synthetic construct
  source 1..20: mol_type = other DNA
caatggtctccttggaggtt

SEQ ID NO: 3008 - DNA, 20 bp, synthetic construct
  source 1..20: mol_type = other DNA
ttcacagctcagggtgacca

SEQ ID NO: 3009 - DNA, 20 bp, synthetic construct
  source 1..20: mol_type = other DNA
gttctggtgttgttgaactt

SEQ ID NO: 3010 - DNA, 20 bp, synthetic construct
  source 1..20: mol_type = other DNA
atttatggtccttccagtct

SEQ ID NO: 3011 - DNA, 20 bp, synthetic construct
  source 1..20: mol_type = other DNA
ctatctaagagtagcatgca

SEQ ID NO: 3012 - DNA, 20 bp, synthetic construct
  source 1..20: mol_type = other DNA
atccagtacacgttgggcct

SEQ ID NO: 3013 - DNA, 20 bp, synthetic construct
  source 1..20: mol_type = other DNA
tagcggctgtccacgttttc

SEQ ID NO: 3014 - DNA, 20 bp, synthetic construct
  source 1..20: mol_type = other DNA
tgtgctatagaacaggctca

SEQ ID NO: 3015 - DNA, 20 bp, synthetic construct
  source 1..20: mol_type = other DNA
gggtacgtgccaagcatcct

SEQ ID NO: 3016 - DNA, 20 bp, synthetic construct
  source 1..20: mol_type = other DNA
ggcgtggtcttgtagttgtt

SEQ ID NO: 3017 - DNA, 20 bp, synthetic construct
  source 1..20: mol_type = other DNA
accgctggtgtaatctcttc

SEQ ID NO: 3018 - DNA, 20 bp, synthetic construct
  source 1..20: mol_type = other DNA
tttgtcttggagaatcatgc

SEQ ID NO: 3019 - DNA, 20 bp, synthetic construct
  source 1..20: mol_type = other DNA
ataaaggaaagcaggctgcc

SEQ ID NO: 3020 - DNA, 20 bp, synthetic construct
  source 1..20: mol_type = other DNA
gacatggtgtaggtgaagca

SEQ ID NO: 3021 - DNA, 20 bp, synthetic construct
  source 1..20: mol_type = other DNA
tctagtatttgcagggcact

SEQ ID NO: 3022 - DNA, 20 bp, synthetic construct
  source 1..20: mol_type = other DNA
aggtctccctcggcccacat

SEQ ID NO: 3023 - DNA, 20 bp, synthetic construct
  source 1..20: mol_type = other DNA
tacggaaggctatcactctg

SEQ ID NO: 3024 - DNA, 20 bp, synthetic construct
  source 1..20: mol_type = other DNA
gagcacttccctgggaattt

SEQ ID NO: 3025 - DNA, 20 bp, synthetic construct
  source 1..20: mol_type = other DNA
cattatagtgccagggtaga

SEQ ID NO: 3026 - DNA, 20 bp, synthetic construct
  source 1..20: mol_type = other DNA
ttctgctggctttgtagatg

SEQ ID NO: 3027 - DNA, 20 bp, synthetic construct
  source 1..20: mol_type = other DNA
ctttcatagaagcctgcttt

SEQ ID NO: 3028 - DNA, 20 bp, synthetic construct
  source 1..20: mol_type = other DNA
atctgtgtagacatgggtat

SEQ ID NO: 3029 - DNA, 20 bp, synthetic construct
  source 1..20: mol_type = other DNA
aatcagagcatatgacaggt

SEQ ID NO: 3030 - DNA, 20 bp, synthetic construct
  source 1..20: mol_type = other DNA
ggtgggccgacaggaagatg

SEQ ID NO: 3031 - DNA, 20 bp, synthetic construct
  source 1..20: mol_type = other DNA
tccatagtcataggaagagc

SEQ ID NO: 3032 - DNA, 20 bp, synthetic construct
  source 1..20: mol_type = other DNA
tgcttgatgatttccaggag

SEQ ID NO: 3033 - DNA, 20 bp, synthetic construct
  source 1..20: mol_type = other DNA
ggttccttcatggagtcata

SEQ ID NO: 3034 - DNA, 20 bp, synthetic construct
  source 1..20: mol_type = other DNA
tagcttatgggaagggagtg

SEQ ID NO: 3035 - DNA, 20 bp, synthetic construct
  source 1..20: mol_type = other DNA
ttgttctataagcaggagag

SEQ ID NO: 3036 - DNA, 20 bp, synthetic construct
  source 1..20: mol_type = other DNA
agtccacttcagaaatgctg

SEQ ID NO: 3037 - DNA, 20 bp, synthetic construct
  source 1..20: mol_type = other DNA
ctgcgtgagcttgttactcg

SEQ ID NO: 3038 - DNA, 20 bp, synthetic construct
  source 1..20: mol_type = other DNA
cgtgatctgtcaccacataa

SEQ ID NO: 3039 - DNA, 20 bp, synthetic construct
  source 1..20: mol_type = other DNA
tgacggaagtacggctgcag

SEQ ID NO: 3040 - DNA, 20 bp, synthetic construct
  source 1..20: mol_type = other DNA
acgacgcaggctggaccaag

SEQ ID NO: 3041 - DNA, 20 bp, synthetic construct
  source 1..20: mol_type = other DNA
gaggaggcatataggaaacg

SEQ ID NO: 3042 - DNA, 20 bp, synthetic construct
  source 1..20: mol_type = other DNA
ttgccctagtagcgttagta

SEQ ID NO: 3043 - DNA, 20 bp, synthetic construct
  source 1..20: mol_type = other DNA
agaacccgtgaaggcccaag

SEQ ID NO: 3044 - DNA, 20 bp, synthetic construct
  source 1..20: mol_type = other DNA
caaatgtaactagcgcctct

SEQ ID NO: 3045 - DNA, 20 bp, synthetic construct
  source 1..20: mol_type = other DNA
tgcgccatgtcatctttcac

SEQ ID NO: 3046 - DNA, 20 bp, synthetic construct
  source 1..20: mol_type = other DNA
ctaagcgacagcgtgacctt

SEQ ID NO: 3047 - DNA, 20 bp, synthetic construct
  source 1..20: mol_type = other DNA
cgacaggtcacatgagccta

SEQ ID NO: 3048 - DNA, 20 bp, synthetic construct
  source 1..20: mol_type = other DNA
atccgcttctcaatggttct

SEQ ID NO: 3049 - DNA, 20 bp, synthetic construct
  source 1..20: mol_type = other DNA
ccgggagccaaaggaaccgc

SEQ ID NO: 3050 - DNA, 20 bp, synthetic construct
  source 1..20: mol_type = other DNA
agatctgccgccgcggaaca

SEQ ID NO: 3051 - DNA, 20 bp, synthetic construct
  source 1..20: mol_type = other DNA
acgtgaaggagatcacgaag

SEQ ID NO: 3052 - DNA, 20 bp, synthetic construct
  source 1..20: mol_type = other DNA
gcatccgtacaggaagacaa

SEQ ID NO: 3053 - DNA, 20 bp, synthetic construct
  source 1..20: mol_type = other DNA
tgttgatttctcccactcct

SEQ ID NO: 3054 - DNA, 20 bp, synthetic construct
  source 1..20: mol_type = other DNA
cccatacatttcacagtcca

SEQ ID NO: 3055 - DNA, 20 bp, synthetic construct
  source 1..20: mol_type = other DNA
ggtccagtggaaatcctgaa

SEQ ID NO: 3056 - DNA, 20 bp, synthetic construct
  source 1..20: mol_type = other DNA
gtggactttacaaaggcaca

SEQ ID NO: 3057 - DNA, 20 bp, synthetic construct
  source 1..20: mol_type = other DNA
cgcagagccataagccctgc

SEQ ID NO: 3058 - DNA, 20 bp, synthetic construct
  source 1..20: mol_type = other DNA
ccacctgagcatacacgtac

SEQ ID NO: 3059 - DNA, 20 bp, synthetic construct
  source 1..20: mol_type = other DNA
cgttctcaccatggaacaag

SEQ ID NO: 3060 - DNA, 20 bp, synthetic construct
  source 1..20: mol_type = other DNA
cgttgaaagcatgaccattg

SEQ ID NO: 3061 - DNA, 20 bp, synthetic construct
  source 1..20: mol_type = other DNA
ctcaaccattctactttcct

SEQ ID NO: 3062 - DNA, 20 bp, synthetic construct
  source 1..20: mol_type = other DNA
gcccttcagtggctgtggtg

SEQ ID NO: 3063 - DNA, 20 bp, synthetic construct
  source 1..20: mol_type = other DNA
agatagcttgcagcaacaaa

SEQ ID NO: 3064 - DNA, 20 bp, synthetic construct
  source 1..20: mol_type = other DNA
gagcagaaggaatgtttttg

SEQ ID NO: 3065 - DNA, 20 bp, synthetic construct
  source 1..20: mol_type = other DNA
gtaatgtcacacagagagac

SEQ ID NO: 3066 - DNA, 20 bp, synthetic construct
  source 1..20: mol_type = other DNA
cgctgtccgagagacacttt

SEQ ID NO: 3067 - DNA, 20 bp, synthetic construct
  source 1..20: mol_type = other DNA
tggtgctcaaaatccacttt

SEQ ID NO: 3068 - DNA, 20 bp, synthetic construct
  source 1..20: mol_type = other DNA
gcctacaaatgatccctgtg

SEQ ID NO: 3069 - DNA, 20 bp, synthetic construct
  source 1..20: mol_type = other DNA
tcgttacgagtcacttcagg

SEQ ID NO: 3070 - DNA, 20 bp, synthetic construct
  source 1..20: mol_type = other DNA
gttatgaaaccgtagaggcc

SEQ ID NO: 3071 - DNA, 20 bp, synthetic construct
  source 1..20: mol_type = other DNA
tctcggatgttggtgggaag

SEQ ID NO: 3072 - DNA, 20 bp, synthetic construct
  source 1..20: mol_type = other DNA
tgtgcattttgcccaaaggc

SEQ ID NO: 3073 - DNA, 20 bp, synthetic construct
  source 1..20: mol_type = other DNA
tagagtgataggacaggact

SEQ ID NO: 3074 - DNA, 20 bp, synthetic construct
  source 1..20: mol_type = other DNA
ctattgacactgagagaggg

SEQ ID NO: 3075 - DNA, 20 bp, synthetic construct
  source 1..20: mol_type = other DNA
tctggattccacactcatag

SEQ ID NO: 3076 - DNA, 20 bp, synthetic construct
  source 1..20: mol_type = other DNA
tggatcttctggatgtctca

SEQ ID NO: 3077 - DNA, 20 bp, synthetic construct
  source 1..20: mol_type = other DNA
tgggtaagatccagaccctg

SEQ ID NO: 3078 - DNA, 20 bp, synthetic construct
  source 1..20: mol_type = other DNA
atggtcaccaaactgaggga

SEQ ID NO: 3079 - DNA, 20 bp, synthetic construct
  source 1..20: mol_type = other DNA
tgcttcggagattgcatttt

SEQ ID NO: 3080 - DNA, 20 bp, synthetic construct
  source 1..20: mol_type = other DNA
gcgggattggagaacaaact

SEQ ID NO: 3081 - DNA, 20 bp, synthetic construct
  source 1..20: mol_type = other DNA
cctgccatgagtgtgtttct

SEQ ID NO: 3082 - DNA, 20 bp, synthetic construct
  source 1..20: mol_type = other DNA
caattatgacagtgtcgttc

SEQ ID NO: 3083 - DNA, 20 bp, synthetic construct
  source 1..20: mol_type = other DNA
ggcacgggttgcttgcaatg

SEQ ID NO: 3084 - DNA, 20 bp, synthetic construct
  source 1..20: mol_type = other DNA
taaggcaagaaacccatttc

SEQ ID NO: 3085 - DNA, 20 bp, synthetic construct
  source 1..20: mol_type = other DNA
gtttcatcactggcagtttc

SEQ ID NO: 3086 - DNA, 20 bp, synthetic construct
  source 1..20: mol_type = other DNA
cctttgcaccgtgagtcagg

SEQ ID NO: 3087 - DNA, 20 bp, synthetic construct
  source 1..20: mol_type = other DNA
cctataccatcttagccact

SEQ ID NO: 3088 - DNA, 20 bp, synthetic construct
  source 1..20: mol_type = other DNA
ttcttgaagtggatcaacct

SEQ ID NO: 3089 - DNA, 20 bp, synthetic construct
  source 1..20: mol_type = other DNA
tagccgggagaatagctacc

SEQ ID NO: 3090 - DNA, 20 bp, synthetic construct
  source 1..20: mol_type = other DNA
agaaaacttgccctgttacc

SEQ ID NO: 3091 - DNA, 20 bp, synthetic construct
  source 1..20: mol_type = other DNA
ggtgttccaggacgtagctg

SEQ ID NO: 3092 - DNA, 20 bp, synthetic construct
  source 1..20: mol_type = other DNA
taatcctgagtgttctttgc

SEQ ID NO: 3093 - DNA, 20 bp, synthetic construct
  source 1..20: mol_type = other DNA
tccggatttccaaacttttg

SEQ ID NO: 3094 - DNA, 20 bp, synthetic construct
  source 1..20: mol_type = other DNA
gcggagaaatgcttgagagg

SEQ ID NO: 3095 - DNA, 20 bp, synthetic construct
  source 1..20: mol_type = other DNA
ccattttagctccttcttga

SEQ ID NO: 3096 - DNA, 20 bp, synthetic construct
  source 1..20: mol_type = other DNA
agccattaggaggagtgagc

SEQ ID NO: 3097 - DNA, 20 bp, synthetic construct
  source 1..20: mol_type = other DNA
caaaccacctccacgacctc

SEQ ID NO: 3098 - DNA, 20 bp, synthetic construct
  source 1..20: mol_type = other DNA
cgtcttcatgtaatcttcct

SEQ ID NO: 3099 - DNA, 20 bp, synthetic construct
  source 1..20: mol_type = other DNA
ccctggacgtggcctgaatg

SEQ ID NO: 3100 - DNA, 20 bp, synthetic construct
  source 1..20: mol_type = other DNA
tacatcgcactgaagtagtt

SEQ ID NO: 3101 - DNA, 20 bp, synthetic construct
  source 1..20: mol_type = other DNA
caccaggaaaagcttccggg

SEQ ID NO: 3102 - DNA, 20 bp, synthetic construct
  source 1..20: mol_type = other DNA
cgttgtgatctccttctgaa

SEQ ID NO: 3103 - DNA, 20 bp, synthetic construct
  source 1..20: mol_type = other DNA
ggaaagcgcggcctcttggt

SEQ ID NO: 3104 - DNA, 20 bp, synthetic construct
  source 1..20: mol_type = other DNA
ataaaccttcattccaggag

SEQ ID NO: 3105 - DNA, 20 bp, synthetic construct
  source 1..20: mol_type = other DNA
atgcacagtaatctggcggt

SEQ ID NO: 3106 - DNA, 20 bp, synthetic construct
  source 1..20: mol_type = other DNA
ctcagtttcagcagcaatgc

SEQ ID NO: 3107 - DNA, 20 bp, synthetic construct
  source 1..20: mol_type = other DNA
ctcctatagctgtgaagcat

SEQ ID NO: 3108 - DNA, 20 bp, synthetic construct
  source 1..20: mol_type = other DNA
agtggtgaggagccgaagcc

SEQ ID NO: 3109 - DNA, 20 bp, synthetic construct
  source 1..20: mol_type = other DNA
gagaacatagcaattagccc

SEQ ID NO: 3110 - DNA, 20 bp, synthetic construct
  source 1..20: mol_type = other DNA
gttccaggtgtcctgcttcc

SEQ ID NO: 3111 - DNA, 20 bp, synthetic construct
  source 1..20: mol_type = other DNA
atctcatgtgcaagtgaaca

SEQ ID NO: 3112 - DNA, 20 bp, synthetic construct
  source 1..20: mol_type = other DNA
tcattcccgccaacctaatg

SEQ ID NO: 3113 - DNA, 20 bp, synthetic construct
  source 1..20: mol_type = other DNA
taaacacttcccagaccgtg

SEQ ID NO: 3114 - DNA, 20 bp, synthetic construct
  source 1..20: mol_type = other DNA
gtcgcctagcgggtcatagc

SEQ ID NO: 3115 - DNA, 20 bp, synthetic construct
  source 1..20: mol_type = other DNA
cggtcatttaggttctgcat

SEQ ID NO: 3116 - DNA, 20 bp, synthetic construct
  source 1..20: mol_type = other DNA
gactgtcttaatcttcctgg

SEQ ID NO: 3117 - DNA, 20 bp, synthetic construct
  source 1..20: mol_type = other DNA
attctgcagagcttctgtgg

SEQ ID NO: 3118 - DNA, 20 bp, synthetic construct
  source 1..20: mol_type = other DNA
gttgagtcacaggactgttt

SEQ ID NO: 3119 - DNA, 20 bp, synthetic construct
  source 1..20: mol_type = other DNA
catctctgttttgacaacga

SEQ ID NO: 3120 - DNA, 20 bp, synthetic construct
  source 1..20: mol_type = other DNA
taagcatggctttccctgct

SEQ ID NO: 3121 - DNA, 20 bp, synthetic construct
  source 1..20: mol_type = other DNA
tggcaggtccaatttctgca

SEQ ID NO: 3122 - DNA, 20 bp, synthetic construct
  source 1..20: mol_type = other DNA
tgtagtctgcctccaggatg

SEQ ID NO: 3123 - DNA, 20 bp, synthetic construct
  source 1..20: mol_type = other DNA
ttcagttgagcctggactga

SEQ ID NO: 3124 - DNA, 20 bp, synthetic construct
  source 1..20: mol_type = other DNA
ggagtggaatggcactggct

SEQ ID NO: 3125 - DNA, 20 bp, synthetic construct
  source 1..20: mol_type = other DNA
agtctccttttctccacctg

SEQ ID NO: 3126 - DNA, 20 bp, synthetic construct
  source 1..20: mol_type = other DNA
gcattccttctccaccacgc

SEQ ID NO: 3127 - DNA, 20 bp, synthetic construct
  source 1..20: mol_type = other DNA
tccgtatgtgccgttgtaca

SEQ ID NO: 3128 - DNA, 20 bp, synthetic construct
  source 1..20: mol_type = other DNA
cacatgcttagtttgttcca

SEQ ID NO: 3129 - DNA, 20 bp, synthetic construct
  source 1..20: mol_type = other DNA
gacctcagccctgagttacc

SEQ ID NO: 3130 - DNA, 20 bp, synthetic construct
  source 1..20: mol_type = other DNA
aatgtggtaacaaaggagcc

SEQ ID NO: 3131 - DNA, 20 bp, synthetic construct
  source 1..20: mol_type = other DNA
tgtggaaacaggagtggttg

SEQ ID NO: 3132 - DNA, 20 bp, synthetic construct
  source 1..20: mol_type = other DNA
catgatgtgaatggctatcg

SEQ ID NO: 3133 - DNA, 20 bp, synthetic construct
  source 1..20: mol_type = other DNA
cgtggaagacatgggagctg

SEQ ID NO: 3134 - DNA, 20 bp, synthetic construct
  source 1..20: mol_type = other DNA
cactttgcaatgcccacttc

SEQ ID NO: 3135 - DNA, 20 bp, synthetic construct
  source 1..20: mol_type = other DNA
tgcaccaactaagttttctg

SEQ ID NO: 3136 - DNA, 20 bp, synthetic construct
  source 1..20: mol_type = other DNA
accagtcaactcctggtatt

SEQ ID NO: 3137 - DNA, 20 bp, synthetic construct
  source 1..20: mol_type = other DNA
agccatctaaagcagtagga

SEQ ID NO: 3138 - DNA, 20 bp, synthetic construct
  source 1..20: mol_type = other DNA
agatcgtcggcctctggaag

SEQ ID NO: 3139 - DNA, 20 bp, synthetic construct
  source 1..20: mol_type = other DNA
cccatatgctggatgaataa

SEQ ID NO: 3140 - DNA, 20 bp, synthetic construct
  source 1..20: mol_type = other DNA
cagcaaggtttccaactact

SEQ ID NO: 3141 - DNA, 20 bp, synthetic construct
  source 1..20: mol_type = other DNA
tttattgcaaaatgcgcctg

SEQ ID NO: 3142 - DNA, 20 bp, synthetic construct
  source 1..20: mol_type = other DNA
actcaacttcaggacttgag

SEQ ID NO: 3143 - DNA, 20 bp, synthetic construct
  source 1..20: mol_type = other DNA
aatgggcgtgtagctgtgtc

SEQ ID NO: 3144 - DNA, 20 bp, synthetic construct
  source 1..20: mol_type = other DNA
tacagtctgacatgagcctc

SEQ ID NO: 3145 - DNA, 20 bp, synthetic construct
  source 1..20: mol_type = other DNA
cggctccactgtaccttggt

SEQ ID NO: 3146 - DNA, 20 bp, synthetic construct
  source 1..20: mol_type = other DNA
tgtctcaccctgtagcggtc

SEQ ID NO: 3147 - DNA, 20 bp, synthetic construct
  source 1..20: mol_type = other DNA
tactgggaaaagaaggagaa

SEQ ID NO: 3148 - DNA, 20 bp, synthetic construct
  source 1..20: mol_type = other DNA
ttaggctcatgatgtgaaac

SEQ ID NO: 3149 - DNA, 20 bp, synthetic construct
  source 1..20: mol_type = other DNA
gattgaatgaggccaaatca

SEQ ID NO: 3150 - DNA, 20 bp, synthetic construct
  source 1..20: mol_type = other DNA
cacagacttggcaacatttg

SEQ ID NO: 3151 - DNA, 20 bp, synthetic construct
  source 1..20: mol_type = other DNA
ctcaaggagagcagcaaaac

SEQ ID NO: 3152 - DNA, 20 bp, synthetic construct
  source 1..20: mol_type = other DNA
gtctcagtggaggtaggtgg

SEQ ID NO: 3153 - DNA, 20 bp, synthetic construct
  source 1..20: mol_type = other DNA
taggagtctgcacttggttc

SEQ ID NO: 3154 - DNA, 20 bp, synthetic construct
  source 1..20: mol_type = other DNA
tctcagtcggtcaagaattc

SEQ ID NO: 3155 - DNA, 20 bp, synthetic construct
  source 1..20: mol_type = other DNA
caacagcagtatctagagcg

SEQ ID NO: 3156 - DNA, 20 bp, synthetic construct
  source 1..20: mol_type = other DNA
gacatcggctaatacatagc

SEQ ID NO: 3157 - DNA, 20 bp, synthetic construct
  source 1..20: mol_type = other DNA
atagccgtatgctgccaggc

SEQ ID NO: 3158 - DNA, 20 bp, synthetic construct
  source 1..20: mol_type = other DNA
cattctgtttaaaacccacc

SEQ ID NO: 3159 - DNA, 20 bp, synthetic construct
  source 1..20: mol_type = other DNA
tctactggtaaaccttccca

SEQ ID NO: 3160 - DNA, 20 bp, synthetic construct
  source 1..20: mol_type = other DNA
gcggtagcaacactggcgag

SEQ ID NO: 3161 - DNA, 20 bp, synthetic construct
  source 1..20: mol_type = other DNA
acaccgtggcaaatcagtag

SEQ ID NO: 3162 - DNA, 20 bp, synthetic construct
  source 1..20: mol_type = other DNA
agtcaaagccgtcaacggca

SEQ ID NO: 3163 - DNA, 20 bp, synthetic construct
  source 1..20: mol_type = other DNA
tgctggttaaaggactgttt

SEQ ID NO: 3164 - DNA, 20 bp, synthetic construct
  source 1..20: mol_type = other DNA
agctggcagaagttaatcct

SEQ ID NO: 3165 - DNA, 20 bp, synthetic construct
  source 1..20: mol_type = other DNA
ggtagcatttctcagctcag

SEQ ID NO: 3166 - DNA, 20 bp, synthetic construct
  source 1..20: mol_type = other DNA
tgtgttctgttacacagcat

SEQ ID NO: 3167 - DNA, 20 bp, synthetic construct
  source 1..20: mol_type = other DNA
gatacaattctaccagcaag

SEQ ID NO: 3168 - DNA, 20 bp, synthetic construct
  source 1..20: mol_type = other DNA
ttgctgtacggtgttacaga

SEQ ID NO: 3169 - DNA, 20 bp, synthetic construct
  source 1..20: mol_type = other DNA
gcctcatgttatcccttttc

SEQ ID NO: 3170 - DNA, 20 bp, synthetic construct
  source 1..20: mol_type = other DNA
tgatcttcaccagaccattc

SEQ ID NO: 3171 - DNA, 20 bp, synthetic construct
  source 1..20: mol_type = other DNA
gcgccgcaagttcaggtggc

SEQ ID NO: 3172 - DNA, 20 bp, synthetic construct
  source 1..20: mol_type = other DNA
tctggacaacagtaacttct

SEQ ID NO: 3173 - DNA, 20 bp, synthetic construct
  source 1..20: mol_type = other DNA
tgggtcacgttgccttcagg

SEQ ID NO: 3174 - DNA, 20 bp, synthetic construct
  source 1..20: mol_type = other DNA
ttgtggtgggttgtgcttga

SEQ ID NO: 3175 - DNA, 20 bp, synthetic construct
  source 1..20: mol_type = other DNA
cggaaaaatcaagtcttctg

SEQ ID NO: 3176 - DNA, 20 bp, synthetic construct
  source 1..20: mol_type = other DNA
tctttcgccacgcccaggca

SEQ ID NO: 3177 - DNA, 20 bp, synthetic construct
  source 1..20: mol_type = other DNA
ccttgatgcattcagaaaag

SEQ ID NO: 3178 - DNA, 20 bp, synthetic construct
  source 1..20: mol_type = other DNA
gtagtggcctgggtagtagg

SEQ ID NO: 3179 - DNA, 20 bp, synthetic construct
  source 1..20: mol_type = other DNA
caggaactccacgccttcct

SEQ ID NO: 3180 - DNA, 20 bp, synthetic construct
  source 1..20: mol_type = other DNA
ttctggcaacttggagctat

SEQ ID NO: 3181 - DNA, 20 bp, synthetic construct
  source 1..20: mol_type = other DNA
tgccaaatggacaggttcaa

SEQ ID NO: 3182 - DNA, 20 bp, synthetic construct
  source 1..20: mol_type = other DNA
gtcttgtgtactgctggcta

SEQ ID NO: 3183 - DNA, 20 bp, synthetic construct
  source 1..20: mol_type = other DNA
gcgaccttctgatatctgtc

SEQ ID NO: 3184 - DNA, 20 bp, synthetic construct
  source 1..20: mol_type = other DNA
tcggttgttgaggctatcgc

SEQ ID NO: 3185 - DNA, 20 bp, synthetic construct
  source 1..20: mol_type = other DNA
ctccattgtggttgaagcag

SEQ ID NO: 3186 - DNA, 20 bp, synthetic construct
  source 1..20: mol_type = other DNA
caactgcttgattcgaggac

SEQ ID NO: 3187 - DNA, 20 bp, synthetic construct
  source 1..20: mol_type = other DNA
ccgctttagtgatctctttg

SEQ ID NO: 3188 - DNA, 20 bp, synthetic construct
  source 1..20: mol_type = other DNA
atccttgccaccatgtagcc

SEQ ID NO: 3189 - DNA, 20 bp, synthetic construct
  source 1..20: mol_type = other DNA
agtgtttttcttcggcctct

SEQ ID NO: 3190 - DNA, 20 bp, synthetic construct
  source 1..20: mol_type = other DNA
tctgttggcacaatggtcca

SEQ ID NO: 3191 - DNA, 20 bp, synthetic construct
  source 1..20: mol_type = other DNA
ccattccttggcaatcctta

SEQ ID NO: 3192 - DNA, 20 bp, synthetic construct
  source 1..20: mol_type = other DNA
accatagaaaacaccaaacc

SEQ ID NO: 3193 - DNA, 20 bp, synthetic construct
  source 1..20: mol_type = other DNA
aatccagatgccgtgaattt

SEQ ID NO: 3194 - DNA, 20 bp, synthetic construct
  source 1..20: mol_type = other DNA
gacaccgtagtggatgttgt

SEQ ID NO: 3195 - DNA, 20 bp, synthetic construct
  source 1..20: mol_type = other DNA
atataagccatgagtgggaa

SEQ ID NO: 3196 - DNA, 20 bp, synthetic construct
  source 1..20: mol_type = other DNA
atctacattctggacaagac

SEQ ID NO: 3197 - DNA, 20 bp, synthetic construct
  source 1..20: mol_type = other DNA
gggccaccgtttccgagcca

SEQ ID NO: 3198 - DNA, 20 bp, synthetic construct
  source 1..20: mol_type = other DNA
gtcaagggtggatagctgat

SEQ ID NO: 3199 - DNA, 20 bp, synthetic construct
  source 1..20: mol_type = other DNA
gattggtttggattctttcg

SEQ ID NO: 3200 - DNA, 20 bp, synthetic construct
  source 1..20: mol_type = other DNA
cccggaggtatctgagcgaa

SEQ ID NO: 3201 - DNA, 20 bp, synthetic construct
  source 1..20: mol_type = other DNA
cgtcatctccttcattgcga

SEQ ID NO: 3202 - DNA, 20 bp, synthetic construct
  source 1..20: mol_type = other DNA
ttccgaaaatctccagatgt

SEQ ID NO: 3203 - DNA, 20 bp, synthetic construct
  source 1..20: mol_type = other DNA
ttcctccacaaagagccacc

SEQ ID NO: 3204 - DNA, 20 bp, synthetic construct
  source 1..20: mol_type = other DNA
agaaaagaggaatgtgtgtg

SEQ ID NO: 3205 - DNA, 20 bp, synthetic construct
  source 1..20: mol_type = other DNA
tcaagtttggcagacaggtt

SEQ ID NO: 3206 - DNA, 20 bp, synthetic construct
  source 1..20: mol_type = other DNA
gcctcttgcaactgacatcc

SEQ ID NO: 3207 - DNA, 20 bp, synthetic construct
  source 1..20: mol_type = other DNA
gtgcaaagcctaactcattg

SEQ ID NO: 3208 - DNA, 20 bp, synthetic construct
  source 1..20: mol_type = other DNA
tcatcatcttcctgcaagtc

SEQ ID NO: 3209 - DNA, 20 bp, synthetic construct
  source 1..20: mol_type = other DNA
accctggaaattaacccatc

SEQ ID NO: 3210 - DNA, 20 bp, synthetic construct
  source 1..20: mol_type = other DNA
taatgcctttgatgaagagg

SEQ ID NO: 3211 - DNA, 20 bp, synthetic construct
  source 1..20: mol_type = other DNA
tcgcgcctactgggtgtctg

SEQ ID NO: 3212 - DNA, 20 bp, synthetic construct
  source 1..20: mol_type = other DNA
ggatgctcgttctgcccatt

SEQ ID NO: 3213 - DNA, 20 bp, synthetic construct
  source 1..20: mol_type = other DNA
gcttcacacgtgtgactctc

SEQ ID NO: 3214 - DNA, 20 bp, synthetic construct
  source 1..20: mol_type = other DNA
atgcatttggcagtctagat

SEQ ID NO: 3215 - DNA, 20 bp, synthetic construct
  source 1..20: mol_type = other DNA
agtcgctcaggttcacggac

SEQ ID NO: 3216 - DNA, 20 bp, synthetic construct
  source 1..20: mol_type = other DNA
caaagcgactcaactcctta

SEQ ID NO: 3217 - DNA, 20 bp, synthetic construct
  source 1..20: mol_type = other DNA
atggattccttcactgctgc

SEQ ID NO: 3218 - DNA, 20 bp, synthetic construct
  source 1..20: mol_type = other DNA
ttgtcgtccatgttcaccag

SEQ ID NO: 3219 - DNA, 20 bp, synthetic construct
  source 1..20: mol_type = other DNA
taagacagtgcctgggagta

SEQ ID NO: 3220 - DNA, 20 bp, synthetic construct
  source 1..20: mol_type = other DNA
cttggcccactcaacgagaa

SEQ ID NO: 3221 - DNA, 20 bp, synthetic construct
  source 1..20: mol_type = other DNA
ggccttttcattgttttcca

SEQ ID NO: 3222 - DNA, 20 bp, synthetic construct
  source 1..20: mol_type = other DNA
acggctgcaccgagtcgtag

SEQ ID NO: 3223 - DNA, 20 bp, synthetic construct
  source 1..20: mol_type = other DNA
taaccctgttcccaagattg

SEQ ID NO: 3224 - DNA, 20 bp, synthetic construct
  source 1..20: mol_type = other DNA
ggtagctttgcaggacctgg

SEQ ID NO: 3225 - DNA, 20 bp, synthetic construct
  source 1..20: mol_type = other DNA
attggccttgacgatgttcc

SEQ ID NO: 3226 - DNA, 20 bp, synthetic construct
  source 1..20: mol_type = other DNA
gagcagtggatgattctgtc

SEQ ID NO: 3227 - DNA, 20 bp, synthetic construct
  source 1..20: mol_type = other DNA
cgaggaatacgcctgcgtgt

SEQ ID NO: 3228 - DNA, 20 bp, synthetic construct
  source 1..20: mol_type = other DNA
tcaaaagctcgtcagctggg

SEQ ID NO: 3229 - DNA, 20 bp, synthetic construct
  source 1..20: mol_type = other DNA
aagtacctgcatttctgcaa

SEQ ID NO: 3230 - DNA, 20 bp, synthetic construct
  source 1..20: mol_type = other DNA
ccgtcattttgctgttcctg

SEQ ID NO: 3231 - DNA, 20 bp, synthetic construct
  source 1..20: mol_type = other DNA
tcatttgggccactgttgct

SEQ ID NO: 3232 - DNA, 20 bp, synthetic construct
  source 1..20: mol_type = other DNA
tcagaaatcaaggctccaga

SEQ ID NO: 3233 - DNA, 20 bp, synthetic construct
  source 1..20: mol_type = other DNA
gaaggagaaagctcctcatc

SEQ ID NO: 3234 - DNA, 20 bp, synthetic construct
  source 1..20: mol_type = other DNA
acatgtttagggtcgttgcc

SEQ ID NO: 3235 - DNA, 20 bp, synthetic construct
  source 1..20: mol_type = other DNA
tccttatagttgttcactgc

SEQ ID NO: 3236 - DNA, 20 bp, synthetic construct
  source 1..20: mol_type = other DNA
attctgttgattaagctggg

SEQ ID NO: 3237 - DNA, 20 bp, synthetic construct
  source 1..20: mol_type = other DNA
tagttgtagtggatggtggt

SEQ ID NO: 3238 - DNA, 20 bp, synthetic construct
  source 1..20: mol_type = other DNA
aggtctgaaaatgtttcctg

SEQ ID NO: 3239 - DNA, 20 bp, synthetic construct
  source 1..20: mol_type = other DNA
cagtgtactgctcaacgagc

SEQ ID NO: 3240 - DNA, 20 bp, synthetic construct
  source 1..20: mol_type = other DNA
ctgactttctgctcttgtct

SEQ ID NO: 3241 - DNA, 20 bp, synthetic construct
  source 1..20: mol_type = other DNA
tctgtggttcagctcaactg

SEQ ID NO: 3242 - DNA, 20 bp, synthetic construct
  source 1..20: mol_type = other DNA
gcctagcctcttttaacagc

SEQ ID NO: 3243 - DNA, 20 bp, synthetic construct
  source 1..20: mol_type = other DNA
actacgactttgacggacac

SEQ ID NO: 3244 - DNA, 20 bp, synthetic construct
  source 1..20: mol_type = other DNA
accagaaatcttgctgaagt

SEQ ID NO: 3245 - DNA, 20 bp, synthetic construct
  source 1..20: mol_type = other DNA
gctgcgtgtcggaggcgtct

SEQ ID NO: 3246 - DNA, 20 bp, synthetic construct
  source 1..20: mol_type = other DNA
ggtcctacactagtgaggat

SEQ ID NO: 3247 - DNA, 20 bp, synthetic construct
  source 1..20: mol_type = other DNA
accgcaacttgcaggtgagc

SEQ ID NO: 3248 - DNA, 20 bp, synthetic construct
  source 1..20: mol_type = other DNA
aactcgagtcacccgtgtta

SEQ ID NO: 3249 - DNA, 20 bp, synthetic construct
  source 1..20: mol_type = other DNA
atgtttgtttctttgctgcc

SEQ ID NO: 3250 - DNA, 20 bp, synthetic construct
  source 1..20: mol_type = other DNA
attgacatcatggagaagga

SEQ ID NO: 3251 - DNA, 20 bp, synthetic construct
  source 1..20: mol_type = other DNA
ggaacttgaggacagagtgt

SEQ ID NO: 3252 - DNA, 20 bp, synthetic construct
  source 1..20: mol_type = other DNA
acgaggagggaacgcgctgt

SEQ ID NO: 3253 - DNA, 20 bp, synthetic construct
  source 1..20: mol_type = other DNA
cgtcaagtacactgaaattc

SEQ ID NO: 3254 - DNA, 20 bp, synthetic construct
  source 1..20: mol_type = other DNA
gtagaaaagggaactgaaca

SEQ ID NO: 3255 - DNA, 20 bp, synthetic construct
  source 1..20: mol_type = other DNA
acttccatgaggtgttttct

SEQ ID NO: 3256 - DNA, 20 bp, synthetic construct
  source 1..20: mol_type = other DNA
tatggtgccatcatgcatga

SEQ ID NO: 3257 - DNA, 20 bp, synthetic construct
  source 1..20: mol_type = other DNA
cgcctcaaggaactgacgct

SEQ ID NO: 3258 - DNA, 20 bp, synthetic construct
  source 1..20: mol_type = other DNA
ttagaaatggaagatggcct

SEQ ID NO: 3259 - DNA, 20 bp, synthetic construct
  source 1..20: mol_type = other DNA
agtattattgtcaccgtggc

SEQ ID NO: 3260 - DNA, 20 bp, synthetic construct
  source 1..20: mol_type = other DNA
ggtgcgtgtttgttaaactc

SEQ ID NO: 3261 - DNA, 20 bp, synthetic construct
  source 1..20: mol_type = other DNA
gggatgctgtgaaagaaggt

SEQ ID NO: 3262 - DNA, 20 bp, synthetic construct
  source 1..20: mol_type = other DNA
ggagactgcacctgatggaa

SEQ ID NO: 3263 - DNA, 20 bp, synthetic construct
  source 1..20: mol_type = other DNA
gtcagaatgcctatctgccc

SEQ ID NO: 3264 - DNA, 20 bp, synthetic construct
  source 1..20: mol_type = other DNA
gcagtacagaaagtatcaca

SEQ ID NO: 3265 - DNA, 20 bp, synthetic construct
  source 1..20: mol_type = other DNA
caatactctgtgaagctggg

SEQ ID NO: 3266 - DNA, 20 bp, synthetic construct
  source 1..20: mol_type = other DNA
ctgagagattcatgctgatt

SEQ ID NO: 3267 - DNA, 20 bp, synthetic construct
  source 1..20: mol_type = other DNA
ggatatccagtgccttatcc

SEQ ID NO: 3268 - DNA, 20 bp, synthetic construct
  source 1..20: mol_type = other DNA
tcgagtcatgtacacaaccc

SEQ ID NO: 3269 - DNA, 20 bp, synthetic construct
  source 1..20: mol_type = other DNA
atccatcaagtttccatagg

SEQ ID NO: 3270 - DNA, 20 bp, synthetic construct
  source 1..20: mol_type = other DNA
cgattcaaaagccagatgcc

SEQ ID NO: 3271 - DNA, 20 bp, synthetic construct
  source 1..20: mol_type = other DNA
aggtttttacccagcacggc

SEQ ID NO: 3272 - DNA, 20 bp, synthetic construct
  source 1..20: mol_type = other DNA
tttggagatcgtgaagtcaa

SEQ ID NO: 3273 - DNA, 20 bp, synthetic construct
  source 1..20: mol_type = other DNA
agatgctaatacagcagccc

SEQ ID NO: 3274 - DNA, 20 bp, synthetic construct
  source 1..20: mol_type = other DNA
attccaccaggtcacctcct

SEQ ID NO: 3275 - DNA, 20 bp, synthetic construct
  source 1..20: mol_type = other DNA
gatatagcttggctctgtat

SEQ ID NO: 3276 - DNA, 20 bp, synthetic construct
  source 1..20: mol_type = other DNA
tgcagacagagcactgaagt

SEQ ID NO: 3277 - DNA, 20 bp, synthetic construct
  source 1..20: mol_type = other DNA
attcccttccacatggatta

SEQ ID NO: 3278 - DNA, 20 bp, synthetic construct
  source 1..20: mol_type = other DNA
tgatgctacatctgtggagt

SEQ ID NO: 3279 - DNA, 20 bp, synthetic construct
  source 1..20: mol_type = other DNA
tgttgttctcgtccctgaca

SEQ ID NO: 3280 - DNA, 20 bp, synthetic construct
  source 1..20: mol_type = other DNA
caagtcctagtgctaaactg

SEQ ID NO: 3281 - DNA, 20 bp, synthetic construct
  source 1..20: mol_type = other DNA
atttggagttcaggtagggt

SEQ ID NO: 3282 - DNA, 20 bp, synthetic construct
  source 1..20: mol_type = other DNA
ggctcaagtcctcgactgct

SEQ ID NO: 3283 - DNA, 20 bp, synthetic construct
  source 1..20: mol_type = other DNA
tgcacatgtggaggaattag

SEQ ID NO: 3284 - DNA, 20 bp, synthetic construct
  source 1..20: mol_type = other DNA
cactcctgacttgacactgt

SEQ ID NO: 3285 - DNA, 20 bp, synthetic construct
  source 1..20: mol_type = other DNA
gttcccaggagaattacggc

SEQ ID NO: 3286 - DNA, 20 bp, synthetic construct
  source 1..20: mol_type = other DNA
ccatggtacacactctgaat

SEQ ID NO: 3287 - DNA, 20 bp, synthetic construct
  source 1..20: mol_type = other DNA
gcacacgagtgcctgccatg

SEQ ID NO: 3288 - DNA, 20 bp, synthetic construct
  source 1..20: mol_type = other DNA
agagagagttgacttacaga

SEQ ID NO: 3289 - DNA, 20 bp, synthetic construct
  source 1..20: mol_type = other DNA
ggaatgcagagtaacagagt

SEQ ID NO: 3290 - DNA, 20 bp, synthetic construct
  source 1..20: mol_type = other DNA
cgaggacataaacagggtgt

SEQ ID NO: 3291 - DNA, 20 bp, synthetic construct
  source 1..20: mol_type = other DNA
cacatgaaaactgacacagg

SEQ ID NO: 3292 - DNA, 20 bp, synthetic construct
  source 1..20: mol_type = other DNA
agtacctcagttgcagccta

SEQ ID NO: 3293 - DNA, 20 bp, synthetic construct
  source 1..20: mol_type = other DNA
agcagttttcctgttcatct

SEQ ID NO: 3294 - DNA, 20 bp, synthetic construct
  source 1..20: mol_type = other DNA
ctgccaaagaccaagttctc

SEQ ID NO: 3295 - DNA, 20 bp, synthetic construct
  source 1..20: mol_type = other DNA
cgggttttgacctcctgaaa

SEQ ID NO: 3296 - DNA, 20 bp, synthetic construct
  source 1..20: mol_type = other DNA
gaatcgccattgctttaagt

SEQ ID NO: 3297 - DNA, 20 bp, synthetic construct
  source 1..20: mol_type = other DNA
cccgtctatttcaaagaaac

SEQ ID NO: 3298 - DNA, 20 bp, synthetic construct
  source 1..20: mol_type = other DNA
acatagagtgtagcagggca

SEQ ID NO: 3299 - DNA, 20 bp, synthetic construct
  source 1..20: mol_type = other DNA
gataagctaagctctcctgc

SEQ ID NO: 3300 - DNA, 20 bp, synthetic construct
  source 1..20: mol_type = other DNA
ctttctattccctgtcctac

SEQ ID NO: 3301 - DNA, 20 bp, synthetic construct
  source 1..20: mol_type = other DNA
gatgctcatgcactggtatg

SEQ ID NO: 3302 - DNA, 20 bp, synthetic construct
  source 1..20: mol_type = other DNA
gactccaaggatcatgcttt

SEQ ID NO: 3303 - DNA, 20 bp, synthetic construct
  source 1..20: mol_type = other DNA
agctgaagagagttcaagat

SEQ ID NO: 3304 - DNA, 20 bp, synthetic construct
  source 1..20: mol_type = other DNA
ctaagacctcatgcatggaa

SEQ ID NO: 3305 - DNA, 20 bp, synthetic construct
  source 1..20: mol_type = other DNA
tgttggcttttatccctatc

SEQ ID NO: 3306 - DNA, 20 bp, synthetic construct
  source 1..20: mol_type = other DNA
ttatgcgaccctttaaggtt

SEQ ID NO: 3307 - DNA, 20 bp, synthetic construct
  source 1..20: mol_type = other DNA
tagaatcattgtgtgttggc

SEQ ID NO: 3308 - DNA, 20 bp, synthetic construct
  source 1..20: mol_type = other DNA
tcacgaagtggtctttgatc

SEQ ID NO: 3309 - DNA, 20 bp, synthetic construct
  source 1..20: mol_type = other DNA
gctagactatcctctcatta

SEQ ID NO: 3310 - DNA, 20 bp, synthetic construct
  source 1..20: mol_type = other DNA
tgctctgaagacttgcagtg

SEQ ID NO: 3311 - DNA, 20 bp, synthetic construct
  source 1..20: mol_type = other DNA
gctactagttcccgcagcca

SEQ ID NO: 3312 - DNA, 20 bp, synthetic construct
  source 1..20: mol_type = other DNA
atgacttctcatctgccaac

SEQ ID NO: 3313 - DNA, 20 bp, synthetic construct
  source 1..20: mol_type = other DNA
tacagccctagatgtgacca

SEQ ID NO: 3314 - DNA, 20 bp, synthetic construct
  source 1..20: mol_type = other DNA
tatgctcatgacttcaactc

SEQ ID NO: 3315 - DNA, 20 bp, synthetic construct
  source 1..20: mol_type = other DNA
atcagctcccaaaatcttct

SEQ ID NO: 3316 - DNA, 20 bp, synthetic construct
  source 1..20: mol_type = other DNA
ttgtcagcttttgttggttg

SEQ ID NO: 3317 - DNA, 20 bp, synthetic construct
  source 1..20: mol_type = other DNA
ggcaagactccatccattcc

SEQ ID NO: 3318 - DNA, 20 bp, synthetic construct
  source 1..20: mol_type = other DNA
tgctgtgtgagttcagatac

SEQ ID NO: 3319 - DNA, 20 bp, synthetic construct
  source 1..20: mol_type = other DNA
taatctttacagacggttcc

SEQ ID NO: 3320 - DNA, 20 bp, synthetic construct
  source 1..20: mol_type = other DNA
accagaatgtccaaggtcga

SEQ ID NO: 3321 - DNA, 20 bp, synthetic construct
  source 1..20: mol_type = other DNA
caccttccagcaagattccc

SEQ ID NO: 3322 - DNA, 20 bp, synthetic construct
  source 1..20: mol_type = other DNA
cagagcaaccaaaaggaccc

SEQ ID NO: 3323 - DNA, 20 bp, synthetic construct
  source 1..20: mol_type = other DNA
gtcatgccatcttccaagga

SEQ ID NO: 3324 - DNA, 20 bp, synthetic construct
  source 1..20: mol_type = other DNA
cgttttgtgggcaccgtaac

SEQ ID NO: 3325 - DNA, 20 bp, synthetic construct
  source 1..20: mol_type = other DNA
aacgttgcctcccagcacac

SEQ ID NO: 3326 - DNA, 20 bp, synthetic construct
  source 1..20: mol_type = other DNA
gacattctggactgattgct

SEQ ID NO: 3327 - DNA, 20 bp, synthetic construct
  source 1..20: mol_type = other DNA
acgtgtatgagcctgatggt

SEQ ID NO: 3328 - DNA, 20 bp, synthetic construct
  source 1..20: mol_type = other DNA
actagagtgcctgtacctta

SEQ ID NO: 3329 - DNA, 20 bp, synthetic construct
  source 1..20: mol_type = other DNA
atgagtcaagttagtcacag

SEQ ID NO: 3330 - DNA, 20 bp, synthetic construct
  source 1..20: mol_type = other DNA
gtaaaatctgcctgtacttc

SEQ ID NO: 3331 - DNA, 20 bp, synthetic construct
  source 1..20: mol_type = other DNA
cgacacctccctgttataaa

SEQ ID NO: 3332 - DNA, 20 bp, synthetic construct
  source 1..20: mol_type = other DNA
taaacagtgacgcaaatgcc

SEQ ID NO: 3333 - DNA, 20 bp, synthetic construct
  source 1..20: mol_type = other DNA
ccaatgcctgatcctcttct

SEQ ID NO: 3334 - DNA, 20 bp, synthetic construct
  source 1..20: mol_type = other DNA
tactgcagctattttctagc

SEQ ID NO: 3335 - DNA, 20 bp, synthetic construct
  source 1..20: mol_type = other DNA
taactcttgtatctgatggc

SEQ ID NO: 3336 - DNA, 20 bp, synthetic construct
  source 1..20: mol_type = other DNA
cgttgtgacagaaatcatac

SEQ ID NO: 3337 - DNA, 20 bp, synthetic construct
  source 1..20: mol_type = other DNA
ggtgcaataagtgttggcaa

SEQ ID NO: 3338 - DNA, 20 bp, synthetic construct
  source 1..20: mol_type = other DNA
atatggaaagcagatgcagt

SEQ ID NO: 3339 - DNA, 20 bp, synthetic construct
  source 1..20: mol_type = other DNA
gctattgaggtagacagaag

SEQ ID NO: 3340 - DNA, 20 bp, synthetic construct
  source 1..20: mol_type = other DNA
gtggctaacatttctttagg

SEQ ID NO: 3341 - DNA, 20 bp, synthetic construct
  source 1..20: mol_type = other DNA
ttgttgaatagcatccactg

SEQ ID NO: 3342 - DNA, 20 bp, synthetic construct
  source 1..20: mol_type = other DNA
ggagttcggtttcctgggtt

SEQ ID NO: 3343 - DNA, 20 bp, synthetic construct
  source 1..20: mol_type = other DNA
atgggtctttgccatggacc

SEQ ID NO: 3344 - DNA, 20 bp, synthetic construct
  source 1..20: mol_type = other DNA
ccaagctaggagagttcttt

SEQ ID NO: 3345 - DNA, 20 bp, synthetic construct
  source 1..20: mol_type = other DNA
atgactaccagtcagttagc

SEQ ID NO: 3346 - DNA, 20 bp, synthetic construct
  source 1..20: mol_type = other DNA
ttcagaagttgcagaatgag

SEQ ID NO: 3347 - DNA, 20 bp, synthetic construct
  source 1..20: mol_type = other DNA
ttacaaggcctctataagac

SEQ ID NO: 3348 - DNA, 20 bp, synthetic construct
  source 1..20: mol_type = other DNA
gaaggatgtcctgtttctag

SEQ ID NO: 3349 - DNA, 20 bp, synthetic construct
  source 1..20: mol_type = other DNA
gattttgtggttcctgtccc

SEQ ID NO: 3350 - DNA, 20 bp, synthetic construct
  source 1..20: mol_type = other DNA
gctctatcgcaagactattt

SEQ ID NO: 3351 - DNA, 20 bp, synthetic construct
  source 1..20: mol_type = other DNA
ttccgtagcgcccgcgtctg

SEQ ID NO: 3352 - DNA, 20 bp, synthetic construct
  source 1..20: mol_type = other DNA
atgcctttctctgttccgac

SEQ ID NO: 3353 - DNA, 20 bp, synthetic construct
  source 1..20: mol_type = other DNA
aaacactgcttccactaatg

SEQ ID NO: 3354 - DNA, 20 bp, synthetic construct
  source 1..20: mol_type = other DNA
tgaggcataatgttccctga

SEQ ID NO: 3355 - DNA, 20 bp, synthetic construct
  source 1..20: mol_type = other DNA
ctggcattctctaaggatct

SEQ ID NO: 3356 - DNA, 20 bp, synthetic construct
  source 1..20: mol_type = other DNA
ggacaaggctccgtaagtat

SEQ ID NO: 3357 - DNA, 20 bp, synthetic construct
  source 1..20: mol_type = other DNA
tggttggccctaaatcaagc

SEQ ID NO: 3358 - DNA, 20 bp, synthetic construct
  source 1..20: mol_type = other DNA
gtggaactataagatgggat

SEQ ID NO: 3359 - DNA, 20 bp, synthetic construct
  source 1..20: mol_type = other DNA
caaaacaactctgggacaca

SEQ ID NO: 3360 - DNA, 20 bp, synthetic construct
  source 1..20: mol_type = other DNA
gcttttcagtcagcttgcag

SEQ ID NO: 3361 - DNA, 20 bp, synthetic construct
  source 1..20: mol_type = other DNA
gggatagacagcttgggctg

SEQ ID NO: 3362 - DNA, 20 bp, synthetic construct
  source 1..20: mol_type = other DNA
gatgcgttcctaggattctt

SEQ ID NO: 3363 - DNA, 20 bp, synthetic construct
  source 1..20: mol_type = other DNA
ttcaagtataacctggtcca

SEQ ID NO: 3364 - DNA, 20 bp, synthetic construct
  source 1..20: mol_type = other DNA
gacacagcctagacagcctg

SEQ ID NO: 3365 - DNA, 20 bp, synthetic construct
  source 1..20: mol_type = other DNA
tcatgaggactataccttca

SEQ ID NO: 3366 - DNA, 20 bp, synthetic construct
  source 1..20: mol_type = other DNA
tgatgggaaaagctgacttt

SEQ ID NO: 3367 - DNA, 20 bp, synthetic construct
  source 1..20: mol_type = other DNA
gcgtgaggcccagaccttaa

SEQ ID NO: 3368 - DNA, 20 bp, synthetic construct
  source 1..20: mol_type = other DNA
ggaaagaacggtctgttcaa

SEQ ID NO: 3369 - DNA, 20 bp, synthetic construct
  source 1..20: mol_type = other DNA
gagagagtttctacggatga

SEQ ID NO: 3370 - DNA, 20 bp, synthetic construct
  source 1..20: mol_type = other DNA
gcagttgcggaactactcta

SEQ ID NO: 3371 - DNA, 20 bp, synthetic construct
  source 1..20: mol_type = other DNA
acattacaccacggtggcta

SEQ ID NO: 3372 - DNA, 20 bp, synthetic construct
  source 1..20: mol_type = other DNA
tatccatgaatagagacagc

SEQ ID NO: 3373 - DNA, 20 bp, synthetic construct
  source 1..20: mol_type = other DNA
cgttagccacatagcacttg

SEQ ID NO: 3374 - DNA, 20 bp, synthetic construct
  source 1..20: mol_type = other DNA
caagtgccactgctacaaca

SEQ ID NO: 3375 - DNA, 20 bp, synthetic construct
  source 1..20: mol_type = other DNA
taattaccctctgctgaaac

SEQ ID NO: 3376 - DNA, 20 bp, synthetic construct
  source 1..20: mol_type = other DNA
cgccaatccaaagaaaggaa

SEQ ID NO: 3377 - DNA, 20 bp, synthetic construct
  source 1..20: mol_type = other DNA
cagaaggtgttgctctgagg

SEQ ID NO: 3378 - DNA, 20 bp, synthetic construct
  source 1..20: mol_type = other DNA
atgtagtggaatgatagtgg

SEQ ID NO: 3379 - DNA, 20 bp, synthetic construct
  source 1..20: mol_type = other DNA
agccctgataacccttgctc

SEQ ID NO: 3380 - DNA, 20 bp, synthetic construct
  source 1..20: mol_type = other DNA
aattctctggattaccaggt

SEQ ID NO: 3381 - DNA, 20 bp, synthetic construct
  source 1..20: mol_type = other DNA
gggaagatgcacagctgctt

SEQ ID NO: 3382 - DNA, 20 bp, synthetic construct
  source 1..20: mol_type = other DNA
tacaaggccctgagttatct

SEQ ID NO: 3383 - DNA, 20 bp, synthetic construct
  source 1..20: mol_type = other DNA
tgaagcctaaacacctgtga

SEQ ID NO: 3384 - DNA, 20 bp, synthetic construct
  source 1..20: mol_type = other DNA
actttgaaggaagtctgagc

SEQ ID NO: 3385 - DNA, 20 bp, synthetic construct
  source 1..20: mol_type = other DNA
cctagactcaatcactgcct

SEQ ID NO: 3386 - DNA, 20 bp, synthetic construct
  source 1..20: mol_type = other DNA
acggaccagaccatgctgac

SEQ ID NO: 3387 - DNA, 20 bp, synthetic construct
  source 1..20: mol_type = other DNA
acaactttggccttggaaaa

SEQ ID NO: 3388 - DNA, 20 bp, synthetic construct
  source 1..20: mol_type = other DNA
acagtaggaagatctggctg

SEQ ID NO: 3389 - DNA, 20 bp, synthetic construct
  source 1..20: mol_type = other DNA
ttgtcttgtgatggagttct

SEQ ID NO: 3390 - DNA, 20 bp, synthetic construct
  source 1..20: mol_type = other DNA
cacgtagtaaatgcccagta

SEQ ID NO: 3391 - DNA, 20 bp, synthetic construct
  source 1..20: mol_type = other DNA
tacgacagaaaagtgacctg

SEQ ID NO: 3392 - DNA, 20 bp, synthetic construct
  source 1..20: mol_type = other DNA
gctaactcttttcataaccc

SEQ ID NO: 3393 - DNA, 20 bp, synthetic construct
  source 1..20: mol_type = other DNA
tcgcaaaaggttgtctagaa

SEQ ID NO: 3394 - DNA, 20 bp, synthetic construct
  source 1..20: mol_type = other DNA
cggaccttgggctacttaaa

SEQ ID NO: 3395 - DNA, 20 bp, synthetic construct
  source 1..20: mol_type = other DNA
aagccgtcatgttagaggcg

SEQ ID NO: 3396 - DNA, 20 bp, synthetic construct
  source 1..20: mol_type = other DNA
aagacgcgatagataggcct

SEQ ID NO: 3397 - DNA, 20 bp, synthetic construct
  source 1..20: mol_type = other DNA
tcgagcagttaaccaggcaa

SEQ ID NO: 3398 - DNA, 20 bp, synthetic construct
  source 1..20: mol_type = other DNA
gataactattcacccagcgc

SEQ ID NO: 3399 - DNA, 20 bp, synthetic construct
  source 1..20: mol_type = other DNA
tcggcgtgcgcattttcgtg

SEQ ID NO: 3400 - DNA, 20 bp, synthetic construct
  source 1..20: mol_type = other DNA
ctagagcgacaccaacatcg

SEQ ID NO: 3401 - DNA, 20 bp, synthetic construct
  source 1..20: mol_type = other DNA
agataggcctaagtgggcct

SEQ ID NO: 3402 - DNA, 20 bp, synthetic construct
  source 1..20: mol_type = other DNA
ggaacgtattccgccgcaca

SEQ ID NO: 3403 - DNA, 20 bp, synthetic construct
  source 1..20: mol_type = other DNA
gttaattggccctgtacctt

SEQ ID NO: 3404 - DNA, 20 bp, synthetic construct
  source 1..20: mol_type = other DNA
agcagatttacgttgagggc

SEQ ID NO: 3405 - DNA, 20 bp, synthetic construct
  source 1..20: mol_type = other DNA
aaccctcgtaatagggctgc

SEQ ID NO: 3406 - DNA, 20 bp, synthetic construct
  source 1..20: mol_type = other DNA
cgtggtatcgggtggttgtg

SEQ ID NO: 3407 - DNA, 20 bp, synthetic construct
  source 1..20: mol_type = other DNA
ggagatgaactaccacgctt

SEQ ID NO: 3408 - DNA, 20 bp, synthetic construct
  source 1..20: mol_type = other DNA
tacagttctcctatcaaggt

SEQ ID NO: 3409 - DNA, 20 bp, synthetic construct
  source 1..20: mol_type = other DNA
aaaaagacgcgatagatagg

SEQ ID NO: 3410 - DNA, 20 bp, synthetic construct
  source 1..20: mol_type = other DNA
atacggaacttcgcaaaagt

SEQ ID NO: 3411 - DNA, 20 bp, synthetic construct
  source 1..20: mol_type = other DNA
tacgacagaaaagtgacctg

SEQ ID NO: 3412 - DNA, 20 bp, synthetic construct
  source 1..20: mol_type = other DNA
gctaactcttttcataaccc

SEQ ID NO: 3413 - DNA, 20 bp, synthetic construct
  source 1..20: mol_type = other DNA
tcgcaaaaggttgtctagaa

SEQ ID NO: 3414 - DNA, 20 bp, synthetic construct
  source 1..20: mol_type = other DNA
cggaccttgggctacttaaa

SEQ ID NO: 3415 - DNA, 20 bp, synthetic construct
  source 1..20: mol_type = other DNA
aagccgtcatgttagaggcg

SEQ ID NO: 3416 - DNA, 20 bp, synthetic construct
  source 1..20: mol_type = other DNA
aagacgcgatagataggcct

SEQ ID NO: 3417 - DNA, 20 bp, synthetic construct
  source 1..20: mol_type = other DNA
tcgagcagttaaccaggcaa

SEQ ID NO: 3418 - DNA, 20 bp, synthetic construct
  source 1..20: mol_type = other DNA
gataactattcacccagcgc

SEQ ID NO: 3419 - DNA, 20 bp, synthetic construct
  source 1..20: mol_type = other DNA
tcggcgtgcgcattttcgtg

SEQ ID NO: 3420 - DNA, 20 bp, synthetic construct
  source 1..20: mol_type = other DNA
ctagagcgacaccaacatcg

SEQ ID NO: 3421 - DNA, 20 bp, synthetic construct
  source 1..20: mol_type = other DNA
gcgacatatctagcaaaaca

SEQ ID NO: 3422 - DNA, 20 bp, synthetic construct
  source 1..20: mol_type = other DNA
cgttgggcgctgtccaaggt

SEQ ID NO: 3423 - DNA, 20 bp, synthetic construct
  source 1..20: mol_type = other DNA
ggcatttcgcattcttagga

SEQ ID NO: 3424 - DNA, 20 bp, synthetic construct
  source 1..20: mol_type = other DNA
tcggcttcatcgggacgccg

SEQ ID NO: 3425 - DNA, 20 bp, synthetic construct
  source 1..20: mol_type = other DNA
acggcgtattaaggtcgtac

SEQ ID NO: 3426 - DNA, 20 bp, synthetic construct
  source 1..20: mol_type = other DNA
gtaaaacgttgggcgctgtc

SEQ ID NO: 3427 - DNA, 20 bp, synthetic construct
  source 1..20: mol_type = other DNA
ttggcatccctaaacaacga

SEQ ID NO: 3428 - DNA, 20 bp, synthetic construct
  source 1..20: mol_type = other DNA
ggttaccgtaatacttcaga

SEQ ID NO: 3429 - DNA, 20 bp, synthetic construct
  source 1..20: mol_type = other DNA
cgtcactctgtatgtccgtg

SEQ ID NO: 3430 - DNA, 20 bp, synthetic construct
  source 1..20: mol_type = other DNA
tgatcagtcaactcaagcga

SEQ ID NO: 3431 - DNA, 20 bp, synthetic construct
  source 1..20: mol_type = other DNA
tacgacagaaaagtgacctg

SEQ ID NO: 3432 - DNA, 20 bp, synthetic construct
  source 1..20: mol_type = other DNA
gctaactcttttcataaccc

SEQ ID NO: 3433 - DNA, 20 bp, synthetic construct
  source 1..20: mol_type = other DNA
tcgcaaaaggttgtctagaa

SEQ ID NO: 3434 - DNA, 20 bp, synthetic construct
  source 1..20: mol_type = other DNA
cggaccttgggctacttaaa

SEQ ID NO: 3435 - DNA, 20 bp, synthetic construct
  source 1..20: mol_type = other DNA
aagccgtcatgttagaggcg

SEQ ID NO: 3436 - DNA, 20 bp, synthetic construct
  source 1..20: mol_type = other DNA
aagacgcgatagataggcct

SEQ ID NO: 3437 - DNA, 20 bp, synthetic construct
  source 1..20: mol_type = other DNA
tcgagcagttaaccaggcaa

SEQ ID NO: 3438 - DNA, 20 bp, synthetic construct
  source 1..20: mol_type = other DNA
gataactattcacccagcgc

SEQ ID NO: 3439 - DNA, 20 bp, synthetic construct
  source 1..20: mol_type = other DNA
tcggcgtgcgcattttcgtg

SEQ ID NO: 3440 - DNA, 20 bp, synthetic construct
  source 1..20: mol_type = other DNA
ctagagcgacaccaacatcg

SEQ ID NO: 3441 - DNA, 20 bp, synthetic construct
  source 1..20: mol_type = other DNA
cagcgcgtgtcgtaaaaaaa

SEQ ID NO: 3442 - DNA, 20 bp, synthetic construct
  source 1..20: mol_type = other DNA
tagcctaaaggttcttgcag

SEQ ID NO: 3443 - DNA, 20 bp, synthetic construct
  source 1..20: mol_type = other DNA
tgaccatatacggcgtatta

SEQ ID NO: 3444 - DNA, 20 bp, synthetic construct
  source 1..20: mol_type = other DNA
tagacccaaacccgactagt

SEQ ID NO: 3445 - DNA, 20 bp, synthetic construct
  source 1..20: mol_type = other DNA
tgcggatctttaggttgacc

SEQ ID NO: 3446 - DNA, 20 bp, synthetic construct
  source 1..20: mol_type = other DNA
agcctaaaggttcttgcaga

SEQ ID NO: 3447 - DNA, 20 bp, synthetic construct
  source 1..20: mol_type = other DNA
taagcggttaccacaggcgc

SEQ ID NO: 3448 - DNA, 20 bp, synthetic construct
  source 1..20: mol_type = other DNA
ccaattagcagagtgtcagg

SEQ ID NO: 3449 - DNA, 20 bp, synthetic construct
  source 1..20: mol_type = other DNA
cattggcggtgacttgagac

SEQ ID NO: 3450 - DNA, 20 bp, synthetic construct
  source 1..20: mol_type = other DNA
tgatacgcccgggactacgg

SEQ ID NO: 3451 - DNA, 20 bp, synthetic construct
  source 1..20: mol_type = other DNA
tacgacagaaaagtgacctg

SEQ ID NO: 3452 - DNA, 20 bp, synthetic construct
  source 1..20: mol_type = other DNA
gctaactcttttcataaccc

SEQ ID NO: 3453 - DNA, 20 bp, synthetic construct
  source 1..20: mol_type = other DNA
tcgcaaaaggttgtctagaa

SEQ ID NO: 3454 - DNA, 20 bp, synthetic construct
  source 1..20: mol_type = other DNA
cggaccttgggctacttaaa

SEQ ID NO: 3455 - DNA, 20 bp, synthetic construct
  source 1..20: mol_type = other DNA
aagccgtcatgttagaggcg

SEQ ID NO: 3456 - DNA, 20 bp, synthetic construct
  source 1..20: mol_type = other DNA
aagacgcgatagataggcct

SEQ ID NO: 3457 - DNA, 20 bp, synthetic construct
  source 1..20: mol_type = other DNA
tcgagcagttaaccaggcaa

SEQ ID NO: 3458 - DNA, 20 bp, synthetic construct
  source 1..20: mol_type = other DNA
gataactattcacccagcgc

SEQ ID NO: 3459 - DNA, 20 bp, synthetic construct
  source 1..20: mol_type = other DNA
tcggcgtgcgcattttcgtg

SEQ ID NO: 3460 - DNA, 20 bp, synthetic construct
  source 1..20: mol_type = other DNA
ctagagcgacaccaacatcg

SEQ ID NO: 3461 - DNA, 20 bp, synthetic construct
  source 1..20: mol_type = other DNA
gttatcttccgcgagttccg

SEQ ID NO: 3462 - DNA, 20 bp, synthetic construct
  source 1..20: mol_type = other DNA
ttgattgtatcacttcgcga

SEQ ID NO: 3463 - DNA, 20 bp, synthetic construct
  source 1..20: mol_type = other DNA
catccaatcacggaatcaag

SEQ ID NO: 3464 - DNA, 20 bp, synthetic construct
  source 1..20: mol_type = other DNA
tcaagtccgaatctctagat

SEQ ID NO: 3465 - DNA, 20 bp, synthetic construct
  source 1..20: mol_type = other DNA
tagacggcatctcacagtca

SEQ ID NO: 3466 - DNA, 20 bp, synthetic construct
  source 1..20: mol_type = other DNA
tcagtcctatagcgaggcca

SEQ ID NO: 3467 - DNA, 20 bp, synthetic construct
  source 1..20: mol_type = other DNA
gacgcattcctgcatcaata

SEQ ID NO: 3468 - DNA, 20 bp, synthetic construct
  source 1..20: mol_type = other DNA
gggttctgtcgaatttgctc

SEQ ID NO: 3469 - DNA, 20 bp, synthetic construct
  source 1..20: mol_type = other DNA
acaggccgctaaagacgttc

SEQ ID NO: 3470 - DNA, 20 bp, synthetic construct
  source 1..20: mol_type = other DNA
aaagacgttctactccgcca

SEQ ID NO: 3471 - DNA, 20 bp, synthetic construct
  source 1..20: mol_type = other DNA
tacgacagaaaagtgacctg

SEQ ID NO: 3472 - DNA, 20 bp, synthetic construct
  source 1..20: mol_type = other DNA
gctaactcttttcataaccc

SEQ ID NO: 3473 - DNA, 20 bp, synthetic construct
  source 1..20: mol_type = other DNA
tcgcaaaaggttgtctagaa

SEQ ID NO: 3474 - DNA, 20 bp, synthetic construct
  source 1..20: mol_type = other DNA
cggaccttgggctacttaaa

SEQ ID NO: 3475 - DNA, 20 bp, synthetic construct
  source 1..20: mol_type = other DNA
aagccgtcatgttagaggcg

SEQ ID NO: 3476 - DNA, 20 bp, synthetic construct
  source 1..20: mol_type = other DNA
aagacgcgatagataggcct

SEQ ID NO: 3477 - DNA, 20 bp, synthetic construct
  source 1..20: mol_type = other DNA
tcgagcagttaaccaggcaa

SEQ ID NO: 3478 - DNA, 20 bp, synthetic construct
  source 1..20: mol_type = other DNA
gataactattcacccagcgc

SEQ ID NO: 3479 - DNA, 20 bp, synthetic construct
  source 1..20: mol_type = other DNA
tcggcgtgcgcattttcgtg

SEQ ID NO: 3480 - DNA, 20 bp, synthetic construct
  source 1..20: mol_type = other DNA
ctagagcgacaccaacatcg

SEQ ID NO: 3481 - DNA, 20 bp, synthetic construct
  source 1..20: mol_type = other DNA
cgcattcttaggatctaaac

SEQ ID NO: 3482 - DNA, 20 bp, synthetic construct
  source 1..20: mol_type = other DNA
tgccatacagttaggtgcta

SEQ ID NO: 3483 - DNA, 20 bp, synthetic construct
  source 1..20: mol_type = other DNA
ccctgaagcagtgagcgtgg

SEQ ID NO: 3484 - DNA, 20 bp, synthetic construct
  source 1..20: mol_type = other DNA
agggcgagcgtcgcagatta

SEQ ID NO: 3485 - DNA, 20 bp, synthetic construct
  source 1..20: mol_type = other DNA
ccagattatctcgcggtgga

SEQ ID NO: 3486 - DNA, 20 bp, synthetic construct
  source 1..20: mol_type = other DNA
tcgtttacgaaacaggtcgc

SEQ ID NO: 3487 - DNA, 20 bp, synthetic construct
  source 1..20: mol_type = other DNA
ggcctaacgagtttgatacg

SEQ ID NO: 3488 - DNA, 20 bp, synthetic construct
  source 1..20: mol_type = other DNA
taaaggcccgtgccgccgga

SEQ ID NO: 3489 - DNA, 20 bp, synthetic construct
  source 1..20: mol_type = other DNA
ggttggttcctcttgaagcg

SEQ ID NO: 3490 - DNA, 20 bp, synthetic construct
  source 1..20: mol_type = other DNA
gtttgataagcgtgttctag

SEQ ID NO: 3491 - DNA, 20 bp, synthetic construct
  source 1..20: mol_type = other DNA
tacgacagaaaagtgacctg

SEQ ID NO: 3492 - DNA, 20 bp, synthetic construct
  source 1..20: mol_type = other DNA
gctaactcttttcataaccc

SEQ ID NO: 3493 - DNA, 20 bp, synthetic construct
  source 1..20: mol_type = other DNA
tcgcaaaaggttgtctagaa

SEQ ID NO: 3494 - DNA, 20 bp, synthetic construct
  source 1..20: mol_type = other DNA
cggaccttgggctacttaaa

SEQ ID NO: 3495 - DNA, 20 bp, synthetic construct
  source 1..20: mol_type = other DNA
aagccgtcatgttagaggcg

SEQ ID NO: 3496 - DNA, 20 bp, synthetic construct
  source 1..20: mol_type = other DNA
aagacgcgatagataggcct

SEQ ID NO: 3497 - DNA, 20 bp, synthetic construct
  source 1..20: mol_type = other DNA
tcgagcagttaaccaggcaa

SEQ ID NO: 3498 - DNA, 20 bp, synthetic construct
  source 1..20: mol_type = other DNA
gataactattcacccagcgc

SEQ ID NO: 3499 - DNA, 20 bp, synthetic construct
  source 1..20: mol_type = other DNA
tcggcgtgcgcattttcgtg

SEQ ID NO: 3500 - DNA, 20 bp, synthetic construct
  source 1..20: mol_type = other DNA
ctagagcgacaccaacatcg

SEQ ID NO: 3501 - DNA, 20 bp, synthetic construct
  source 1..20: mol_type = other DNA
cttccgcgagttccgcccaa

SEQ ID NO: 3502 - DNA, 20 bp, synthetic construct
  source 1..20: mol_type = other DNA
ggacttgcagctcgtaacgc

SEQ ID NO: 3503 - DNA, 20 bp, synthetic construct
  source 1..20: mol_type = other DNA
gtacagcacgtacgttatat

SEQ ID NO: 3504 - DNA, 20 bp, synthetic construct
  source 1..20: mol_type = other DNA
ccaactaggtggacaaacct

SEQ ID NO: 3505 - DNA, 20 bp, synthetic construct
  source 1..20: mol_type = other DNA
atgtgctcgcttgcccatca

SEQ ID NO: 3506 - DNA, 20 bp, synthetic construct
  source 1..20: mol_type = other DNA
gcctaacgagtttgatacgc

SEQ ID NO: 3507 - DNA, 20 bp, synthetic construct
  source 1..20: mol_type = other DNA
tacgatgtgtttgcataagc

SEQ ID NO: 3508 - DNA, 20 bp, synthetic construct
  source 1..20: mol_type = other DNA
agtagaaaacgagatagggt

SEQ ID NO: 3509 - DNA, 20 bp, synthetic construct
  source 1..20: mol_type = other DNA
gggatacttggtcaaagctc

SEQ ID NO: 3510 - DNA, 20 bp, synthetic construct
  source 1..20: mol_type = other DNA
gccattgccacgaggttctc

SEQ ID NO: 3511 - DNA, 20 bp, synthetic construct
  source 1..20: mol_type = other DNA
ggcaaaggctgagccatacc

SEQ ID NO: 3512 - DNA, 20 bp, synthetic construct
  source 1..20: mol_type = other DNA
ctgggaaggaatcattcaca

SEQ ID NO: 3513 - DNA, 20 bp, synthetic construct
  source 1..20: mol_type = other DNA
tgtgcttcgtcacccacgta

SEQ ID NO: 3514 - DNA, 20 bp, synthetic construct
  source 1..20: mol_type = other DNA
ggtttcctggtcatgaccgg

SEQ ID NO: 3515 - DNA, 20 bp, synthetic construct
  source 1..20: mol_type = other DNA
ggaggaggctctgagttagt

SEQ ID NO: 3516 - DNA, 20 bp, synthetic construct
  source 1..20: mol_type = other DNA
tgatgtgcttgtcttccata

SEQ ID NO: 3517 - DNA, 20 bp, synthetic construct
  source 1..20: mol_type = other DNA
ctgaaaatcaacgctgccat

SEQ ID NO: 3518 - DNA, 20 bp, synthetic construct
  source 1..20: mol_type = other DNA
cttgcagaaccagttccctc

SEQ ID NO: 3519 - DNA, 20 bp, synthetic construct
  source 1..20: mol_type = other DNA
gcaaaagtgcctcaatccat

SEQ ID NO: 3520 - DNA, 20 bp, synthetic construct
  source 1..20: mol_type = other DNA
cacaaagcaattacggtaga

SEQ ID NO: 3521 - DNA, 20 bp, synthetic construct
  source 1..20: mol_type = other DNA
ccaactccaaagagacatat

SEQ ID NO: 3522 - DNA, 20 bp, synthetic construct
  source 1..20: mol_type = other DNA
ctcttcatcttccacaatag

SEQ ID NO: 3523 - DNA, 20 bp, synthetic construct
  source 1..20: mol_type = other DNA
tgcgctctttgaccgcgcgc

SEQ ID NO: 3524 - DNA, 20 bp, synthetic construct
  source 1..20: mol_type = other DNA
gacctctttgcttaacttga

SEQ ID NO: 3525 - DNA, 20 bp, synthetic construct
  source 1..20: mol_type = other DNA
gcaatacctggcttttctca

SEQ ID NO: 3526 - DNA, 20 bp, synthetic construct
  source 1..20: mol_type = other DNA
tcttcgtcttggccctcgac

SEQ ID NO: 3527 - DNA, 20 bp, synthetic construct
  source 1..20: mol_type = other DNA
tggttgtggtcatagcgccg

SEQ ID NO: 3528 - DNA, 20 bp, synthetic construct
  source 1..20: mol_type = other DNA
ttgtcgatagcaccatcagg

SEQ ID NO: 3529 - DNA, 20 bp, synthetic construct
  source 1..20: mol_type = other DNA
tcctcagcttcagaaatgtt

SEQ ID NO: 3530 - DNA, 20 bp, synthetic construct
  source 1..20: mol_type = other DNA
gagggtctctgtctttagag

SEQ ID NO: 3531 - DNA, 20 bp, synthetic construct
  source 1..20: mol_type = other DNA
cacaccaatggagaaatagt

SEQ ID NO: 3532 - DNA, 20 bp, synthetic construct
  source 1..20: mol_type = other DNA
tctccaccacaggccaaaac

SEQ ID NO: 3533 - DNA, 20 bp, synthetic construct
  source 1..20: mol_type = other DNA
gtagctgaagccttgccggt

SEQ ID NO: 3534 - DNA, 20 bp, synthetic construct
  source 1..20: mol_type = other DNA
tcaacctggtcactctcatc

SEQ ID NO: 3535 - DNA, 20 bp, synthetic construct
  source 1..20: mol_type = other DNA
ctgctgtcacagtgttgagg

SEQ ID NO: 3536 - DNA, 20 bp, synthetic construct
  source 1..20: mol_type = other DNA
ccctccttcaggacgggaat

SEQ ID NO: 3537 - DNA, 20 bp, synthetic construct
  source 1..20: mol_type = other DNA
gacaatgcacatcaccaata

SEQ ID NO: 3538 - DNA, 20 bp, synthetic construct
  source 1..20: mol_type = other DNA
ggagcagaccacctcgtcac

SEQ ID NO: 3539 - DNA, 20 bp, synthetic construct
  source 1..20: mol_type = other DNA
gcagcggtcattcagatatg

SEQ ID NO: 3540 - DNA, 20 bp, synthetic construct
  source 1..20: mol_type = other DNA
tgtggcaaaggcaataaaag

SEQ ID NO: 3541 - DNA, 20 bp, synthetic construct
  source 1..20: mol_type = other DNA
tccagcagacgccctcgacg

SEQ ID NO: 3542 - DNA, 20 bp, synthetic construct
  source 1..20: mol_type = other DNA
aaggtgagattctgcaggac

SEQ ID NO: 3543 - DNA, 20 bp, synthetic construct
  source 1..20: mol_type = other DNA
agaggcaaaagattccagtt

SEQ ID NO: 3544 - DNA, 20 bp, synthetic construct
  source 1..20: mol_type = other DNA
tcacctcgatggtgaacggt

SEQ ID NO: 3545 - DNA, 20 bp, synthetic construct
  source 1..20: mol_type = other DNA
aggtccaatgatgttgaagg

SEQ ID NO: 3546 - DNA, 20 bp, synthetic construct
  source 1..20: mol_type = other DNA
gcagcccttgagcacatttc

SEQ ID NO: 3547 - DNA, 20 bp, synthetic construct
  source 1..20: mol_type = other DNA
gtctctcggtgagggctagg

SEQ ID NO: 3548 - DNA, 20 bp, synthetic construct
  source 1..20: mol_type = other DNA
gctggtttaaaaccagcggc

SEQ ID NO: 3549 - DNA, 20 bp, synthetic construct
  source 1..20: mol_type = other DNA
cagaatcctcttccatgctc

SEQ ID NO: 3550 - DNA, 20 bp, synthetic construct
  source 1..20: mol_type = other DNA
gttttcagctcttctgaggc

SEQ ID NO: 3551 - DNA, 20 bp, synthetic construct
  source 1..20: mol_type = other DNA
ttgtctcttgcaagcactgg

SEQ ID NO: 3552 - DNA, 20 bp, synthetic construct
  source 1..20: mol_type = other DNA
agattctgctgctaagaacc

SEQ ID NO: 3553 - DNA, 20 bp, synthetic construct
  source 1..20: mol_type = other DNA
gagcgaggagaagtgtctga

SEQ ID NO: 3554 - DNA, 20 bp, synthetic construct
  source 1..20: mol_type = other DNA
cccaagagatggacattgtc

SEQ ID NO: 3555 - DNA, 20 bp, synthetic construct
  source 1..20: mol_type = other DNA
ctttattgatctcatagccc

SEQ ID NO: 3556 - DNA, 20 bp, synthetic construct
  source 1..20: mol_type = other DNA
gtcttcattcacccagtacc

SEQ ID NO: 3557 - DNA, 20 bp, synthetic construct
  source 1..20: mol_type = other DNA
agtctcaatgatgatcctct

SEQ ID NO: 3558 - DNA, 20 bp, synthetic construct
  source 1..20: mol_type = other DNA
cctgtgagttatccaccatt

SEQ ID NO: 3559 - DNA, 20 bp, synthetic construct
  source 1..20: mol_type = other DNA
gcaggtattgtagagtaagg

SEQ ID NO: 3560 - DNA, 20 bp, synthetic construct
  source 1..20: mol_type = other DNA
cttttgctcttaccgggctc

SEQ ID NO: 3561 - DNA, 20 bp, synthetic construct
  source 1..20: mol_type = other DNA
gagaaggagagcgcgttggg

SEQ ID NO: 3562 - DNA, 20 bp, synthetic construct
  source 1..20: mol_type = other DNA
cagtacattttcattgccca

SEQ ID NO: 3563 - DNA, 20 bp, synthetic construct
  source 1..20: mol_type = other DNA
cacataggagaatgtactgt

SEQ ID NO: 3564 - DNA, 20 bp, synthetic construct
  source 1..20: mol_type = other DNA
gagaccttggtgaatgtcag

SEQ ID NO: 3565 - DNA, 20 bp, synthetic construct
  source 1..20: mol_type = other DNA
tgggcctggttgaaaagcat

SEQ ID NO: 3566 - DNA, 20 bp, synthetic construct
  source 1..20: mol_type = other DNA
tttcattgcctggtagttca

SEQ ID NO: 3567 - DNA, 20 bp, synthetic construct
  source 1..20: mol_type = other DNA
tttatccacttagggatggt

SEQ ID NO: 3568 - DNA, 20 bp, synthetic construct
  source 1..20: mol_type = other DNA
cgagtggatgaggaatttct

SEQ ID NO: 3569 - DNA, 20 bp, synthetic construct
  source 1..20: mol_type = other DNA
ttggtttaatcccattgccc

SEQ ID NO: 3570 - DNA, 20 bp, synthetic construct
  source 1..20: mol_type = other DNA
gctggttgtccaaatcaaca

SEQ ID NO: 3571 - DNA, 20 bp, synthetic construct
  source 1..20: mol_type = other DNA
tcttcagggcattgttcttc

SEQ ID NO: 3572 - DNA, 20 bp, synthetic construct
  source 1..20: mol_type = other DNA
tcactgctgctttgaatggg

SEQ ID NO: 3573 - DNA, 20 bp, synthetic construct
  source 1..20: mol_type = other DNA
gatgttggcatcgttttcgg

SEQ ID NO: 3574 - DNA, 20 bp, synthetic construct
  source 1..20: mol_type = other DNA
ggtggtgattctcgagcacc

SEQ ID NO: 3575 - DNA, 20 bp, synthetic construct
  source 1..20: mol_type = other DNA
tgtcaccatcgtgtccacag

SEQ ID NO: 3576 - DNA, 20 bp, synthetic construct
  source 1..20: mol_type = other DNA
gttattccgcaatgaatgtc

SEQ ID NO: 3577 - DNA, 20 bp, synthetic construct
  source 1..20: mol_type = other DNA
ccaaagcatctcagagaaaa

SEQ ID NO: 3578 - DNA, 20 bp, synthetic construct
  source 1..20: mol_type = other DNA
tgtgggtctgttactcggca

SEQ ID NO: 3579 - DNA, 20 bp, synthetic construct
  source 1..20: mol_type = other DNA
tcacaggagatggttgagga

SEQ ID NO: 3580 - DNA, 20 bp, synthetic construct
  source 1..20: mol_type = other DNA
ccttcagaatgttggcgagt

SEQ ID NO: 3581 - DNA, 20 bp, synthetic construct
  source 1..20: mol_type = other DNA
gcactgaagaggtatttact

SEQ ID NO: 3582 - DNA, 20 bp, synthetic construct
  source 1..20: mol_type = other DNA
cacagttagttctgccttcg

SEQ ID NO: 3583 - DNA, 20 bp, synthetic construct
  source 1..20: mol_type = other DNA
cccgccctgtgaaaagcaga

SEQ ID NO: 3584 - DNA, 20 bp, synthetic construct
  source 1..20: mol_type = other DNA
ccagtcggaaatccggtcct

SEQ ID NO: 3585 - DNA, 20 bp, synthetic construct
  source 1..20: mol_type = other DNA
gaagcagcaggtaaaagagg

SEQ ID NO: 3586 - DNA, 20 bp, synthetic construct
  source 1..20: mol_type = other DNA
gccatggtctgcacggtgta

SEQ ID NO: 3587 - DNA, 20 bp, synthetic construct
  source 1..20: mol_type = other DNA
tctccatccagcaaggtgag

SEQ ID NO: 3588 - DNA, 20 bp, synthetic construct
  source 1..20: mol_type = other DNA
ttcttcactagtcattccct

SEQ ID NO: 3589 - DNA, 20 bp, synthetic construct
  source 1..20: mol_type = other DNA
gagtttcttctgtttctcca

SEQ ID NO: 3590 - DNA, 20 bp, synthetic construct
  source 1..20: mol_type = other DNA
cactcgagcagaacatttcc

SEQ ID NO: 3591 - DNA, 20 bp, synthetic construct
  source 1..20: mol_type = other DNA
actgcctcacactagtgagc

SEQ ID NO: 3592 - DNA, 20 bp, synthetic construct
  source 1..20: mol_type = other DNA
gtgtaccttaaaagtgtctc

SEQ ID NO: 3593 - DNA, 20 bp, synthetic construct
  source 1..20: mol_type = other DNA
cctatttccattgaccacaa

SEQ ID NO: 3594 - DNA, 20 bp, synthetic construct
  source 1..20: mol_type = other DNA
tattatttctcggacccgtg

SEQ ID NO: 3595 - DNA, 20 bp, synthetic construct
  source 1..20: mol_type = other DNA
tacaactggtggagaacggg

SEQ ID NO: 3596 - DNA, 20 bp, synthetic construct
  source 1..20: mol_type = other DNA
ccactacagccgtattctcc

SEQ ID NO: 3597 - DNA, 20 bp, synthetic construct
  source 1..20: mol_type = other DNA
ccaacatgttggtgtttgca

SEQ ID NO: 3598 - DNA, 20 bp, synthetic construct
  source 1..20: mol_type = other DNA
ctgcagctcatgttgatctt

SEQ ID NO: 3599 - DNA, 20 bp, synthetic construct
  source 1..20: mol_type = other DNA
gcactccattctccagagga

SEQ ID NO: 3600 - DNA, 20 bp, synthetic construct
  source 1..20: mol_type = other DNA
ctcattgtcaggatccacag

SEQ ID NO: 3601 - DNA, 20 bp, synthetic construct
  source 1..20: mol_type = other DNA
gtttctatggtaaccatcct

SEQ ID NO: 3602 - DNA, 20 bp, synthetic construct
  source 1..20: mol_type = other DNA
gaggtcacgctctgtacaac

SEQ ID NO: 3603 - DNA, 20 bp, synthetic construct
  source 1..20: mol_type = other DNA
gttggacattacctcgtggc

SEQ ID NO: 3604 - DNA, 20 bp, synthetic construct
  source 1..20: mol_type = other DNA
gttaggacggagcctgaatc

SEQ ID NO: 3605 - DNA, 20 bp, synthetic construct
  source 1..20: mol_type = other DNA
tcctttggaaagtggagcac

SEQ ID NO: 3606 - DNA, 20 bp, synthetic construct
  source 1..20: mol_type = other DNA
agtatagagagcgctttgaa

SEQ ID NO: 3607 - DNA, 20 bp, synthetic construct
  source 1..20: mol_type = other DNA
gcaagattaagcagcaggca

SEQ ID NO: 3608 - DNA, 20 bp, synthetic construct
  source 1..20: mol_type = other DNA
tcatgattgctttacatggg

SEQ ID NO: 3609 - DNA, 20 bp, synthetic construct
  source 1..20: mol_type = other DNA
gcggcagtccagacgaaggc

SEQ ID NO: 3610 - DNA, 20 bp, synthetic construct
  source 1..20: mol_type = other DNA
gcttcatatacgtgagacac

SEQ ID NO: 3611 - DNA, 20 bp, synthetic construct
  source 1..20: mol_type = other DNA
cctttcccatcttatctcca

SEQ ID NO: 3612 - DNA, 20 bp, synthetic construct
  source 1..20: mol_type = other DNA
caggtgcctccgttaaggca

SEQ ID NO: 3613 - DNA, 20 bp, synthetic construct
  source 1..20: mol_type = other DNA
tcaggcttggaaacatccac

SEQ ID NO: 3614 - DNA, 20 bp, synthetic construct
  source 1..20: mol_type = other DNA
tgcacctgtctccggtactc

SEQ ID NO: 3615 - DNA, 20 bp, synthetic construct
  source 1..20: mol_type = other DNA
cagtcagcttgaaattctgc

SEQ ID NO: 3616 - DNA, 20 bp, synthetic construct
  source 1..20: mol_type = other DNA
gcagagatgcgggctcactg

SEQ ID NO: 3617 - DNA, 20 bp, synthetic construct
  source 1..20: mol_type = other DNA
taaatggaatgaggtgacct

SEQ ID NO: 3618 - DNA, 20 bp, synthetic construct
  source 1..20: mol_type = other DNA
ctgcattccagagacaaagt

SEQ ID NO: 3619 - DNA, 20 bp, synthetic construct
  source 1..20: mol_type = other DNA
tccatgcgtttgctcatgtt

SEQ ID NO: 3620 - DNA, 20 bp, synthetic construct
  source 1..20: mol_type = other DNA
ggtggagaaagcttcataat

SEQ ID NO: 3621 - DNA, 20 bp, synthetic construct
  source 1..20: mol_type = other DNA
agctcagcaccatgttaaat

SEQ ID NO: 3622 - DNA, 20 bp, synthetic construct
  source 1..20: mol_type = other DNA
gttgggatctccacggtagt

SEQ ID NO: 3623 - DNA, 20 bp, synthetic construct
  source 1..20: mol_type = other DNA
aggacagagttagatgaagt

SEQ ID NO: 3624 - DNA, 20 bp, synthetic construct
  source 1..20: mol_type = other DNA
gagatcttcctattggtgaa

SEQ ID NO: 3625 - DNA, 20 bp, synthetic construct
  source 1..20: mol_type = other DNA
ggagcacttgccactggtgt

SEQ ID NO: 3626 - DNA, 20 bp, synthetic construct
  source 1..20: mol_type = other DNA
gcagaaacaggcaaatttgt

SEQ ID NO: 3627 - DNA, 20 bp, synthetic construct
  source 1..20: mol_type = other DNA
ccaatttgcttcacgtcaaa

SEQ ID NO: 3628 - DNA, 20 bp, synthetic construct
  source 1..20: mol_type = other DNA
tgcacattgcattcccaaag

SEQ ID NO: 3629 - DNA, 20 bp, synthetic construct
  source 1..20: mol_type = other DNA
tgtctttgccagcaatagat

SEQ ID NO: 3630 - DNA, 20 bp, synthetic construct
  source 1..20: mol_type = other DNA
tgctgactctgcatcctcat

SEQ ID NO: 3631 - DNA, 20 bp, synthetic construct
  source 1..20: mol_type = other DNA
tccttgaagagcttgaagag

SEQ ID NO: 3632 - DNA, 20 bp, synthetic construct
  source 1..20: mol_type = other DNA
atggagagcactgtggctag

SEQ ID NO: 3633 - DNA, 20 bp, synthetic construct
  source 1..20: mol_type = other DNA
acgcgctttagaaacggctc

SEQ ID NO: 3634 - DNA, 20 bp, synthetic construct
  source 1..20: mol_type = other DNA
gctggaccacatgcatctcg

SEQ ID NO: 3635 - DNA, 20 bp, synthetic construct
  source 1..20: mol_type = other DNA
cgtgtgaatggcactgccaa

SEQ ID NO: 3636 - DNA, 20 bp, synthetic construct
  source 1..20: mol_type = other DNA
cccggtattgaatttggtgg

SEQ ID NO: 3637 - DNA, 20 bp, synthetic construct
  source 1..20: mol_type = other DNA
cccaggccacctaggtccga

SEQ ID NO: 3638 - DNA, 20 bp, synthetic construct
  source 1..20: mol_type = other DNA
ctggccgagcagtgatctcc

SEQ ID NO: 3639 - DNA, 20 bp, synthetic construct
  source 1..20: mol_type = other DNA
atatcaccatgtttagtgcc

SEQ ID NO: 3640 - DNA, 20 bp, synthetic construct
  source 1..20: mol_type = other DNA
gaaacctaaagggactaaag

SEQ ID NO: 3641 - DNA, 20 bp, synthetic construct
  source 1..20: mol_type = other DNA
gtaagccctgggagtacact

SEQ ID NO: 3642 - DNA, 20 bp, synthetic construct
  source 1..20: mol_type = other DNA
cttgtccaaaacatcgtact

SEQ ID NO: 3643 - DNA, 20 bp, synthetic construct
  source 1..20: mol_type = other DNA
gcataataagatggctccca

SEQ ID NO: 3644 - DNA, 20 bp, synthetic construct
  source 1..20: mol_type = other DNA
caggtactttgtcttgctca

SEQ ID NO: 3645 - DNA, 20 bp, synthetic construct
  source 1..20: mol_type = other DNA
cacatcaaacaagccctgct

SEQ ID NO: 3646 - DNA, 20 bp, synthetic construct
  source 1..20: mol_type = other DNA
gtccctgccagtctcgaaaa

SEQ ID NO: 3647 - DNA, 20 bp, synthetic construct
  source 1..20: mol_type = other DNA
accaccagcacccaaaaggg

SEQ ID NO: 3648 - DNA, 20 bp, synthetic construct
  source 1..20: mol_type = other DNA
gctaacattgtatgtcgggc

SEQ ID NO: 3649 - DNA, 20 bp, synthetic construct
  source 1..20: mol_type = other DNA
gagtctcttaagcagatagg

SEQ ID NO: 3650 - DNA, 20 bp, synthetic construct
  source 1..20: mol_type = other DNA
cacaggtcagggttgtgttg

SEQ ID NO: 3651 - DNA, 20 bp, synthetic construct
  source 1..20: mol_type = other DNA
tcaggtttttggagtggccg

SEQ ID NO: 3652 - DNA, 20 bp, synthetic construct
  source 1..20: mol_type = other DNA
ttattgagctcttacactcc

SEQ ID NO: 3653 - DNA, 20 bp, synthetic construct
  source 1..20: mol_type = other DNA
tcagggtcttttgggaatag

SEQ ID NO: 3654 - DNA, 20 bp, synthetic construct
  source 1..20: mol_type = other DNA
agctgcggcgattcatcagg

SEQ ID NO: 3655 - DNA, 20 bp, synthetic construct
  source 1..20: mol_type = other DNA
tgtctgaaccttctctggtt

SEQ ID NO: 3656 - DNA, 20 bp, synthetic construct
  source 1..20: mol_type = other DNA
gcttataatcgattccagct

SEQ ID NO: 3657 - DNA, 20 bp, synthetic construct
  source 1..20: mol_type = other DNA
atctgtcccattacacctat

SEQ ID NO: 3658 - DNA, 20 bp, synthetic construct
  source 1..20: mol_type = other DNA
ctcaatggatgcagggtaag

SEQ ID NO: 3659 - DNA, 20 bp, synthetic construct
  source 1..20: mol_type = other DNA
gtgatgcagatgtccactat

SEQ ID NO: 3660 - DNA, 20 bp, synthetic construct
  source 1..20: mol_type = other DNA
ggacggcgatagaaaagtag

SEQ ID NO: 3661 - DNA, 20 bp, synthetic construct
  source 1..20: mol_type = other DNA
gtgacactgttcagagtttg

SEQ ID NO: 3662 - DNA, 20 bp, synthetic construct
  source 1..20: mol_type = other DNA
tggctataaatggagcttga

SEQ ID NO: 3663 - DNA, 20 bp, synthetic construct
  source 1..20: mol_type = other DNA
aggtgtctaggaattcgctt

SEQ ID NO: 3664 - DNA, 20 bp, synthetic construct
  source 1..20: mol_type = other DNA
ttggatttgcagtaggctga

SEQ ID NO: 3665 - DNA, 20 bp, synthetic construct
  source 1..20: mol_type = other DNA
aagccttcatgtgatgtaga

SEQ ID NO: 3666 - DNA, 20 bp, synthetic construct
  source 1..20: mol_type = other DNA
tccaaccacagcgaggatat

SEQ ID NO: 3667 - DNA, 20 bp, synthetic construct
  source 1..20: mol_type = other DNA
cttactactctccaaatcgg

SEQ ID NO: 3668 - DNA, 20 bp, synthetic construct
  source 1..20: mol_type = other DNA
ctagcaccacgatgtctatt

SEQ ID NO: 3669 - DNA, 20 bp, synthetic construct
  source 1..20: mol_type = other DNA
tgctagtccggcacttggta

SEQ ID NO: 3670 - DNA, 20 bp, synthetic construct
  source 1..20: mol_type = other DNA
actccaaagaaggtctcatc

SEQ ID NO: 3671 - DNA, 20 bp, synthetic construct
  source 1..20: mol_type = other DNA
cagcgtcacctggatgtgta

SEQ ID NO: 3672 - DNA, 20 bp, synthetic construct
  source 1..20: mol_type = other DNA
catcacatggtcctctgtca

SEQ ID NO: 3673 - DNA, 20 bp, synthetic construct
  source 1..20: mol_type = other DNA
ctctgtccaagccggtttga

SEQ ID NO: 3674 - DNA, 20 bp, synthetic construct
  source 1..20: mol_type = other DNA
taggtgccgcaggactgctg

SEQ ID NO: 3675 - DNA, 20 bp, synthetic construct
  source 1..20: mol_type = other DNA
gcttagggtcaaaagtgaaa

SEQ ID NO: 3676 - DNA, 20 bp, synthetic construct
  source 1..20: mol_type = other DNA
agtgatatcaaagatggtcc

SEQ ID NO: 3677 - DNA, 20 bp, synthetic construct
  source 1..20: mol_type = other DNA
atggtcatattgctcgtaac

SEQ ID NO: 3678 - DNA, 20 bp, synthetic construct
  source 1..20: mol_type = other DNA
tcctggtcctgccaaaatac

SEQ ID NO: 3679 - DNA, 20 bp, synthetic construct
  source 1..20: mol_type = other DNA
catgatggagttgctcaggg

SEQ ID NO: 3680 - DNA, 20 bp, synthetic construct
  source 1..20: mol_type = other DNA
ggagagtcaccctccttttc

SEQ ID NO: 3681 - DNA, 20 bp, synthetic construct
  source 1..20: mol_type = other DNA
cacaaaggtatcagcctgtt

SEQ ID NO: 3682 - DNA, 20 bp, synthetic construct
  source 1..20: mol_type = other DNA
agccaatagggagcaatttt

SEQ ID NO: 3683 - DNA, 20 bp, synthetic construct
  source 1..20: mol_type = other DNA
gggctatcccactgaagaga

SEQ ID NO: 3684 - DNA, 20 bp, synthetic construct
  source 1..20: mol_type = other DNA
accttgtgtgaaagttacag

SEQ ID NO: 3685 - DNA, 20 bp, synthetic construct
  source 1..20: mol_type = other DNA
agggcactgcattgatagtc

SEQ ID NO: 3686 - DNA, 20 bp, synthetic construct
  source 1..20: mol_type = other DNA
ccttctcctcacttcgtgct

SEQ ID NO: 3687 - DNA, 20 bp, synthetic construct
  source 1..20: mol_type = other DNA
tcttcaagacagtgttctgt

SEQ ID NO: 3688 - DNA, 20 bp, synthetic construct
  source 1..20: mol_type = other DNA
tcctgaagctttgaaatgtg

SEQ ID NO: 3689 - DNA, 20 bp, synthetic construct
  source 1..20: mol_type = other DNA
ccagtccacagaatcaggca

SEQ ID NO: 3690 - DNA, 20 bp, synthetic construct
  source 1..20: mol_type = other DNA
ggttcatgcccagatcgtat

SEQ ID NO: 3691 - DNA, 20 bp, synthetic construct
  source 1..20: mol_type = other DNA
cagcagccaaaaaagggaac

SEQ ID NO: 3692 - DNA, 20 bp, synthetic construct
  source 1..20: mol_type = other DNA
gcacagacgttggtgatgag

SEQ ID NO: 3693 - DNA, 20 bp, synthetic construct
  source 1..20: mol_type = other DNA
ctgagaaggtaaaagtctgg

SEQ ID NO: 3694 - DNA, 20 bp, synthetic construct
  source 1..20: mol_type = other DNA
cctcgcaggagagactgccg

SEQ ID NO: 3695 - DNA, 20 bp, synthetic construct
  source 1..20: mol_type = other DNA
ccagcagaatgccaaccacc

SEQ ID NO: 3696 - DNA, 20 bp, synthetic construct
  source 1..20: mol_type = other DNA
gtggttctgagaaaggtcga

SEQ ID NO: 3697 - DNA, 20 bp, synthetic construct
  source 1..20: mol_type = other DNA
gcatgatgtcgcggaagttg

SEQ ID NO: 3698 - DNA, 20 bp, synthetic construct
  source 1..20: mol_type = other DNA
gcacttggtattctgggtcc

SEQ ID NO: 3699 - DNA, 20 bp, synthetic construct
  source 1..20: mol_type = other DNA
ctcctgttgtaccaaccgta

SEQ ID NO: 3700 - DNA, 20 bp, synthetic construct
  source 1..20: mol_type = other DNA
ccttggccagtgaaaatcta

SEQ ID NO: 3701 - DNA, 20 bp, synthetic construct
  source 1..20: mol_type = other DNA
ctggaacggcatcaacttgg

SEQ ID NO: 3702 - DNA, 20 bp, synthetic construct
  source 1..20: mol_type = other DNA
cactaatgctgttgtcctga

SEQ ID NO: 3703 - DNA, 20 bp, synthetic construct
  source 1..20: mol_type = other DNA
gcaaacatgcgtgtgaacca

SEQ ID NO: 3704 - DNA, 20 bp, synthetic construct
  source 1..20: mol_type = other DNA
gagtgtggttgtggtggtct

SEQ ID NO: 3705 - DNA, 20 bp, synthetic construct
  source 1..20: mol_type = other DNA
agaaacaagaaaccctccga

SEQ ID NO: 3706 - DNA, 20 bp, synthetic construct
  source 1..20: mol_type = other DNA
agccgctgagatgcctttca

SEQ ID NO: 3707 - DNA, 20 bp, synthetic construct
  source 1..20: mol_type = other DNA
tgcggctaaaatcttgcttg

SEQ ID NO: 3708 - DNA, 20 bp, synthetic construct
  source 1..20: mol_type = other DNA
gtctctgtgtagtagctgtg

SEQ ID NO: 3709 - DNA, 20 bp, synthetic construct
  source 1..20: mol_type = other DNA
tccatgcagcaattgaagtt

SEQ ID NO: 3710 - DNA, 20 bp, synthetic construct
  source 1..20: mol_type = other DNA
cacgagggtctccgcattta

SEQ ID NO: 3711 - DNA, 20 bp, synthetic construct
  source 1..20: mol_type = other DNA
gacttctctcagagtatcgg

SEQ ID NO: 3712 - DNA, 20 bp, synthetic construct
  source 1..20: mol_type = other DNA
aatggcgtaagtcagattcg

SEQ ID NO: 3713 - DNA, 20 bp, synthetic construct
  source 1..20: mol_type = other DNA
cgactcttctcttgcagaaa

SEQ ID NO: 3714 - DNA, 20 bp, synthetic construct
  source 1..20: mol_type = other DNA
gttttcgacttaggacagta

SEQ ID NO: 3715 - DNA, 20 bp, synthetic construct
  source 1..20: mol_type = other DNA
ggtgataaaagggtcgccgt

SEQ ID NO: 3716 - DNA, 20 bp, synthetic construct
  source 1..20: mol_type = other DNA
cctagtgtatataaaagccc

SEQ ID NO: 3717 - DNA, 20 bp, synthetic construct
  source 1..20: mol_type = other DNA
cagggcagataggcattctg

SEQ ID NO: 3718 - DNA, 20 bp, synthetic construct
  source 1..20: mol_type = other DNA
ttgcagaaacaaagtcaggg

SEQ ID NO: 3719 - DNA, 20 bp, synthetic construct
  source 1..20: mol_type = other DNA
ccagctagatgttagagtac

SEQ ID NO: 3720 - DNA, 20 bp, synthetic construct
  source 1..20: mol_type = other DNA
ccttctttgccatatccaca

SEQ ID NO: 3721 - DNA, 20 bp, synthetic construct
  source 1..20: mol_type = other DNA
ctggatccttctggtattca

SEQ ID NO: 3722 - DNA, 20 bp, synthetic construct
  source 1..20: mol_type = other DNA
cgagtgatccctgacaggtg

SEQ ID NO: 3723 - DNA, 20 bp, synthetic construct
  source 1..20: mol_type = other DNA
acagcgcctttagcaaagtg

SEQ ID NO: 3724 - DNA, 20 bp, synthetic construct
  source 1..20: mol_type = other DNA
gttttccatagcgtgtgcca

SEQ ID NO: 3725 - DNA, 20 bp, synthetic construct
  source 1..20: mol_type = other DNA
caacccatgggatcttgctt

SEQ ID NO: 3726 - DNA, 20 bp, synthetic construct
  source 1..20: mol_type = other DNA
ttccttgatggtctccacac

SEQ ID NO: 3727 - DNA, 20 bp, synthetic construct
  source 1..20: mol_type = other DNA
acggacgttgggtggtaccc

SEQ ID NO: 3728 - DNA, 20 bp, synthetic construct
  source 1..20: mol_type = other DNA
gttcttgtatttccaggaga

SEQ ID NO: 3729 - DNA, 20 bp, synthetic construct
  source 1..20: mol_type = other DNA
cttttctttgttgccgttgg

SEQ ID NO: 3730 - DNA, 20 bp, synthetic construct
  source 1..20: mol_type = other DNA
ggacactgggtagcttcttt

SEQ ID NO: 3731 - DNA, 20 bp, synthetic construct
  source 1..20: mol_type = other DNA
ctgtggtacaggtccaaggt

SEQ ID NO: 3732 - DNA, 20 bp, synthetic construct
  source 1..20: mol_type = other DNA
gacaaggcttggcaacccag

SEQ ID NO: 3733 - DNA, 20 bp, synthetic construct
  source 1..20: mol_type = other DNA
gctgctgcaactagcttaag

SEQ ID NO: 3734 - DNA, 20 bp, synthetic construct
  source 1..20: mol_type = other DNA
ttgggctgaacttttctcat

SEQ ID NO: 3735 - DNA, 20 bp, synthetic construct
  source 1..20: mol_type = other DNA
caaggtgaggtggatcggtt

SEQ ID NO: 3736 - DNA, 20 bp, synthetic construct
  source 1..20: mol_type = other DNA
tgctgtagtggtggtcggag

SEQ ID NO: 3737 - DNA, 20 bp, synthetic construct
  source 1..20: mol_type = other DNA
acacaaattgcatggtgaag

SEQ ID NO: 3738 - DNA, 20 bp, synthetic construct
  source 1..20: mol_type = other DNA
tttgaatgtggcgtgtggga

SEQ ID NO: 3739 - DNA, 20 bp, synthetic construct
  source 1..20: mol_type = other DNA
tgtaaatatggacgtctcca

SEQ ID NO: 3740 - DNA, 20 bp, synthetic construct
  source 1..20: mol_type = other DNA
cagacacaggagatgttggc

SEQ ID NO: 3741 - DNA, 20 bp, synthetic construct
  source 1..20: mol_type = other DNA
ctctttcttgcaaagaaggg

SEQ ID NO: 3742 - DNA, 20 bp, synthetic construct
  source 1..20: mol_type = other DNA
tccatctttttcagccatct

SEQ ID NO: 3743 - DNA, 20 bp, synthetic construct
  source 1..20: mol_type = other DNA
tggtctcatgcaaatgggct

SEQ ID NO: 3744 - DNA, 20 bp, synthetic construct
  source 1..20: mol_type = other DNA
tcatacattgctgccggttg

SEQ ID NO: 3745 - DNA, 20 bp, synthetic construct
  source 1..20: mol_type = other DNA
tagtttcctgaaattcaggc

SEQ ID NO: 3746 - DNA, 20 bp, synthetic construct
  source 1..20: mol_type = other DNA
aggttcattgagtaggtacc

SEQ ID NO: 3747 - DNA, 20 bp, synthetic construct
  source 1..20: mol_type = other DNA
gggaagaaggcagaggttgc

SEQ ID NO: 3748 - DNA, 20 bp, synthetic construct
  source 1..20: mol_type = other DNA
cttgatgtaccagtcaaacg

SEQ ID NO: 3749 - DNA, 20 bp, synthetic construct
  source 1..20: mol_type = other DNA
catcattcatgtctgaatcc

SEQ ID NO: 3750 - DNA, 20 bp, synthetic construct
  source 1..20: mol_type = other DNA
acgggattcttctgaatgtg

SEQ ID NO: 3751 - DNA, 20 bp, synthetic construct
  source 1..20: mol_type = other DNA
gacttgagcttctccttctc

SEQ ID NO: 3752 - DNA, 20 bp, synthetic construct
  source 1..20: mol_type = other DNA
ccctcgggtgcatccaggtt

SEQ ID NO: 3753 - DNA, 20 bp, synthetic construct
  source 1..20: mol_type = other DNA
gtcagacaaatggtacacaa

SEQ ID NO: 3754 - DNA, 20 bp, synthetic construct
  source 1..20: mol_type = other DNA
tgagcatctttacagcgaca

SEQ ID NO: 3755 - DNA, 20 bp, synthetic construct
  source 1..20: mol_type = other DNA
gttttctcttttccacgttg

SEQ ID NO: 3756 - DNA, 20 bp, synthetic construct
  source 1..20: mol_type = other DNA
acccagtaacaaccaagaca

SEQ ID NO: 3757 - DNA, 20 bp, synthetic construct
  source 1..20: mol_type = other DNA
gtatgtgcagctacaagtac

SEQ ID NO: 3758 - DNA, 20 bp, synthetic construct
  source 1..20: mol_type = other DNA
caggcggtgtgctcctcact

SEQ ID NO: 3759 - DNA, 20 bp, synthetic construct
  source 1..20: mol_type = other DNA
cttcagtaaagaagtgccaa

SEQ ID NO: 3760 - DNA, 20 bp, synthetic construct
  source 1..20: mol_type = other DNA
cttcttgtgccattattcac

SEQ ID NO: 3761 - DNA, 20 bp, synthetic construct
  source 1..20: mol_type = other DNA
tacattcatcagggatgaca

SEQ ID NO: 3762 - DNA, 20 bp, synthetic construct
  source 1..20: mol_type = other DNA
gtactcaccactacacaccc

SEQ ID NO: 3763 - DNA, 20 bp, synthetic construct
  source 1..20: mol_type = other DNA
atacatgatggagacgttga

SEQ ID NO: 3764 - DNA, 20 bp, synthetic construct
  source 1..20: mol_type = other DNA
ccaccctggaacctgctcca

SEQ ID NO: 3765 - DNA, 20 bp, synthetic construct
  source 1..20: mol_type = other DNA
tagcagatatggtcattgct

SEQ ID NO: 3766 - DNA, 20 bp, synthetic construct
  source 1..20: mol_type = other DNA
ctcatgtctgaagcgcagta

SEQ ID NO: 3767 - DNA, 20 bp, synthetic construct
  source 1..20: mol_type = other DNA
cacgcaaatgcattactgta

SEQ ID NO: 3768 - DNA, 20 bp, synthetic construct
  source 1..20: mol_type = other DNA
tgttccagttgacaaaggag

SEQ ID NO: 3769 - DNA, 20 bp, synthetic construct
  source 1..20: mol_type = other DNA
agaagaagcgtgacaacaca

SEQ ID NO: 3770 - DNA, 20 bp, synthetic construct
  source 1..20: mol_type = other DNA
gaacagagattgtatgctgt

SEQ ID NO: 3771 - DNA, 20 bp, synthetic construct
  source 1..20: mol_type = other DNA
gccgaggtcctgaacacaaa

SEQ ID NO: 3772 - DNA, 20 bp, synthetic construct
  source 1..20: mol_type = other DNA
cagccaccacgtagacctca

SEQ ID NO: 3773 - DNA, 20 bp, synthetic construct
  source 1..20: mol_type = other DNA
ttgttgcagtgtctagacgg

SEQ ID NO: 3774 - DNA, 20 bp, synthetic construct
  source 1..20: mol_type = other DNA
ggtcattcttcaaagagtct

SEQ ID NO: 3775 - DNA, 20 bp, synthetic construct
  source 1..20: mol_type = other DNA
aggcctttggaatacaacgc

SEQ ID NO: 3776 - DNA, 20 bp, synthetic construct
  source 1..20: mol_type = other DNA
gtaagttccctcacgtgagt

SEQ ID NO: 3777 - DNA, 20 bp, synthetic construct
  source 1..20: mol_type = other DNA
attgctgccatgctctatta

SEQ ID NO: 3778 - DNA, 20 bp, synthetic construct
  source 1..20: mol_type = other DNA
cacgacaccaaccaccaggg

SEQ ID NO: 3779 - DNA, 20 bp, synthetic construct
  source 1..20: mol_type = other DNA
acccatgggactgggtgctg

SEQ ID NO: 3780 - DNA, 20 bp, synthetic construct
  source 1..20: mol_type = other DNA
gagttccgcacagtcgcgtc

SEQ ID NO: 3781 - DNA, 20 bp, synthetic construct
  source 1..20: mol_type = other DNA
gtggatccgacagttaagat

SEQ ID NO: 3782 - DNA, 20 bp, synthetic construct
  source 1..20: mol_type = other DNA
aaggctcttcatgaggctta

SEQ ID NO: 3783 - DNA, 20 bp, synthetic construct
  source 1..20: mol_type = other DNA
ttggcgttcttaggaactgt

SEQ ID NO: 3784 - DNA, 20 bp, synthetic construct
  source 1..20: mol_type = other DNA
agtgtgctggattcacatag

SEQ ID NO: 3785 - DNA, 20 bp, synthetic construct
  source 1..20: mol_type = other DNA
cggagggcttaggcagtttg

SEQ ID NO: 3786 - DNA, 20 bp, synthetic construct
  source 1..20: mol_type = other DNA
ccgaacagcaggtcgttaat

SEQ ID NO: 3787 - DNA, 20 bp, synthetic construct
  source 1..20: mol_type = other DNA
tagaatcctgtccgggtaca

SEQ ID NO: 3788 - DNA, 20 bp, synthetic construct
  source 1..20: mol_type = other DNA
tgtgatactttctgtactgc

SEQ ID NO: 3789 - DNA, 20 bp, synthetic construct
  source 1..20: mol_type = other DNA
tccagctgcgacattttgca

SEQ ID NO: 3790 - DNA, 20 bp, synthetic construct
  source 1..20: mol_type = other DNA
cccaattaactcagttcctt

SEQ ID NO: 3791 - DNA, 20 bp, synthetic construct
  source 1..20: mol_type = other DNA
cagagtcttctccagatact

SEQ ID NO: 3792 - DNA, 20 bp, synthetic construct
  source 1..20: mol_type = other DNA
gtgacacttcacccacatac

SEQ ID NO: 3793 - DNA, 20 bp, synthetic construct
  source 1..20: mol_type = other DNA
tgagtaacagctgttcttgt

SEQ ID NO: 3794 - DNA, 20 bp, synthetic construct
  source 1..20: mol_type = other DNA
cttcagacagctgtaaatga

SEQ ID NO: 3795 - DNA, 20 bp, synthetic construct
  source 1..20: mol_type = other DNA
tttggcatctgacagatgtt

SEQ ID NO: 3796 - DNA, 20 bp, synthetic construct
  source 1..20: mol_type = other DNA
tttagcccatgtgatctgac

SEQ ID NO: 3797 - DNA, 20 bp, synthetic construct
  source 1..20: mol_type = other DNA
gggaatgtcaggatataggt

SEQ ID NO: 3798 - DNA, 20 bp, synthetic construct
  source 1..20: mol_type = other DNA
gcctttattgtagggttcta

SEQ ID NO: 3799 - DNA, 20 bp, synthetic construct
  source 1..20: mol_type = other DNA
agagatgaaactatgggccc

SEQ ID NO: 3800 - DNA, 20 bp, synthetic construct
  source 1..20: mol_type = other DNA
acctggctggactttgccag

SEQ ID NO: 3801 - DNA, 20 bp, synthetic construct
  source 1..20: mol_type = other DNA
ttccacactgcacccacttg

SEQ ID NO: 3802 - DNA, 20 bp, synthetic construct
  source 1..20: mol_type = other DNA
cgcagcaccaggtaaacgac

SEQ ID NO: 3803 - DNA, 20 bp, synthetic construct
  source 1..20: mol_type = other DNA
tgaggatcggtatcgtccat

SEQ ID NO: 3804 - DNA, 20 bp, synthetic construct
  source 1..20: mol_type = other DNA
gtgggtgtgcaacatgaaat

SEQ ID NO: 3805 - DNA, 20 bp, synthetic construct
  source 1..20: mol_type = other DNA
tgctgctccacttttaactt

SEQ ID NO: 3806 - DNA, 20 bp, synthetic construct
  source 1..20: mol_type = other DNA
gtgccttgatgccgggcaaa

SEQ ID NO: 3807 - DNA, 20 bp, synthetic construct
  source 1..20: mol_type = other DNA
gtcgcggccatggctccaag

SEQ ID NO: 3808 - DNA, 20 bp, synthetic construct
  source 1..20: mol_type = other DNA
cccatgaaagaaaatcagtc

SEQ ID NO: 3809 - DNA, 20 bp, synthetic construct
  source 1..20: mol_type = other DNA
agtaagcaagtcctcaaatg

SEQ ID NO: 3810 - DNA, 20 bp, synthetic construct
  source 1..20: mol_type = other DNA
tcagtggccgccttgattca

SEQ ID NO: 3811 - DNA, 20 bp, synthetic construct
  source 1..20: mol_type = other DNA
ccagccattttcaagacttc

SEQ ID NO: 3812 - DNA, 20 bp, synthetic construct
  source 1..20: mol_type = other DNA
ggcttaggctctgatatgcc

SEQ ID NO: 3813 - DNA, 20 bp, synthetic construct
  source 1..20: mol_type = other DNA
aggtccagagaatcgcattc

SEQ ID NO: 3814 - DNA, 20 bp, synthetic construct
  source 1..20: mol_type = other DNA
gaaaccaaggaagtttctac

SEQ ID NO: 3815 - DNA, 20 bp, synthetic construct
  source 1..20: mol_type = other DNA
cggcttggagctgaccacgt

SEQ ID NO: 3816 - DNA, 20 bp, synthetic construct
  source 1..20: mol_type = other DNA
gagaaactatttggaggaca

SEQ ID NO: 3817 - DNA, 20 bp, synthetic construct
  source 1..20: mol_type = other DNA
tggcacaggtatgatactag

SEQ ID NO: 3818 - DNA, 20 bp, synthetic construct
  source 1..20: mol_type = other DNA
ctgtttcttctggaccctga

SEQ ID NO: 3819 - DNA, 20 bp, synthetic construct
  source 1..20: mol_type = other DNA
gatgtgggcacttgctccat

SEQ ID NO: 3820 - DNA, 20 bp, synthetic construct
  source 1..20: mol_type = other DNA
aggctggacgttattccgac

SEQ ID NO: 3821 - DNA, 20 bp, synthetic construct
  source 1..20: mol_type = other DNA
gtggagccgtgggtcagtat

SEQ ID NO: 3822 - DNA, 20 bp, synthetic construct
  source 1..20: mol_type = other DNA
aacatctggagagaggaagg

SEQ ID NO: 3823 - DNA, 20 bp, synthetic construct
  source 1..20: mol_type = other DNA
tcaactgggcctttcggatg

SEQ ID NO: 3824 - DNA, 20 bp, synthetic construct
  source 1..20: mol_type = other DNA
gctgtgcacaggtaagagtg

SEQ ID NO: 3825 - DNA, 20 bp, synthetic construct
  source 1..20: mol_type = other DNA
ccagaagttggacgaaaagt

SEQ ID NO: 3826 - DNA, 20 bp, synthetic construct
  source 1..20: mol_type = other DNA
ttccaacaatgtgtctcttc

SEQ ID NO: 3827 - DNA, 20 bp, synthetic construct
  source 1..20: mol_type = other DNA
tggctgctcgtctcaaagta

SEQ ID NO: 3828 - DNA, 20 bp, synthetic construct
  source 1..20: mol_type = other DNA
cagctactagcatgaggaga

SEQ ID NO: 3829 - DNA, 20 bp, synthetic construct
  source 1..20: mol_type = other DNA
ggacacattgtactccaccg

SEQ ID NO: 3830 - DNA, 20 bp, synthetic construct
  source 1..20: mol_type = other DNA
gtgcttggagatctcgaagg

SEQ ID NO: 3831 - DNA, 20 bp, synthetic construct
  source 1..20: mol_type = other DNA
ccattgtgacttatgttggt

SEQ ID NO: 3832 - DNA, 20 bp, synthetic construct
  source 1..20: mol_type = other DNA
gatgtcacagatgcattcag

SEQ ID NO: 3833 - DNA, 20 bp, synthetic construct
  source 1..20: mol_type = other DNA
cttgagtgatggtgatgttc

SEQ ID NO: 3834 - DNA, 20 bp, synthetic construct
  source 1..20: mol_type = other DNA
tgttgcgcttaaagcttaca

SEQ ID NO: 3835 - DNA, 20 bp, synthetic construct
  source 1..20: mol_type = other DNA
taggtcaccacggttttcga

SEQ ID NO: 3836 - DNA, 20 bp, synthetic construct
  source 1..20: mol_type = other DNA
cgtcgctgcctaccatcgct

SEQ ID NO: 3837 - DNA, 20 bp, synthetic construct
  source 1..20: mol_type = other DNA
tggtccttgaacagcgctct

SEQ ID NO: 3838 - DNA, 20 bp, synthetic construct
  source 1..20: mol_type = other DNA
tcccgcggctttgtcttggc

SEQ ID NO: 3839 - DNA, 20 bp, synthetic construct
  source 1..20: mol_type = other DNA
gctttcgcaagaacacgggc

SEQ ID NO: 3840 - DNA, 20 bp, synthetic construct
  source 1..20: mol_type = other DNA
ggctggcattttgagacata

SEQ ID NO: 3841 - DNA, 20 bp, synthetic construct
  source 1..20: mol_type = other DNA
agagagggaagatcttgatt

SEQ ID NO: 3842 - DNA, 20 bp, synthetic construct
  source 1..20: mol_type = other DNA
cagctgccgacattgttcaa

SEQ ID NO: 3843 - DNA, 20 bp, synthetic construct
  source 1..20: mol_type = other DNA
caggcttcgcaagagcacat

SEQ ID NO: 3844 - DNA, 20 bp, synthetic construct
  source 1..20: mol_type = other DNA
tgtaataacagttgccgtcc

SEQ ID NO: 3845 - DNA, 20 bp, synthetic construct
  source 1..20: mol_type = other DNA
tctgcgttttgtcgaagacc

SEQ ID NO: 3846 - DNA, 20 bp, synthetic construct
  source 1..20: mol_type = other DNA
atgtcacaactgggaaagaa

SEQ ID NO: 3847 - DNA, 20 bp, synthetic construct
  source 1..20: mol_type = other DNA
tttcccatacaggtggtaaa

SEQ ID NO: 3848 - DNA, 20 bp, synthetic construct
  source 1..20: mol_type = other DNA
gagtcagaaagataaggcag

SEQ ID NO: 3849 - DNA, 20 bp, synthetic construct
  source 1..20: mol_type = other DNA
gcagaaagattccttagtac

SEQ ID NO: 3850 - DNA, 20 bp, synthetic construct
  source 1..20: mol_type = other DNA
tgtcacagttgttacttggg

SEQ ID NO: 3851 - DNA, 20 bp, synthetic construct
  source 1..20: mol_type = other DNA
gacacatagatgcttttgac

SEQ ID NO: 3852 - DNA, 20 bp, synthetic construct
  source 1..20: mol_type = other DNA
acatctacacctcaagcttg

SEQ ID NO: 3853 - DNA, 20 bp, synthetic construct
  source 1..20: mol_type = other DNA
gtgtatatagggtgctgtga

SEQ ID NO: 3854 - DNA, 20 bp, synthetic construct
  source 1..20: mol_type = other DNA
attgtaggtggatagtccct

SEQ ID NO: 3855 - DNA, 20 bp, synthetic construct
  source 1..20: mol_type = other DNA
agttccaagtcactcctgta

SEQ ID NO: 3856 - DNA, 20 bp, synthetic construct
  source 1..20: mol_type = other DNA
tcagaccaggatgaatcccg

SEQ ID NO: 3857 - DNA, 20 bp, synthetic construct
  source 1..20: mol_type = other DNA
caggcctgaggtgaccgact

SEQ ID NO: 3858 - DNA, 20 bp, synthetic construct
  source 1..20: mol_type = other DNA
gtttcttctggtaacccatg

SEQ ID NO: 3859 - DNA, 20 bp, synthetic construct
  source 1..20: mol_type = other DNA
gatatatctgtcatctgcct

SEQ ID NO: 3860 - DNA, 20 bp, synthetic construct
  source 1..20: mol_type = other DNA
aagatgacgtaaatgaccca

SEQ ID NO: 3861 - DNA, 20 bp, synthetic construct
  source 1..20: mol_type = other DNA
cttgcaggtattgtccacgg

SEQ ID NO: 3862 - DNA, 20 bp, synthetic construct
  source 1..20: mol_type = other DNA
ggccaaacacccattcatgg

SEQ ID NO: 3863 - DNA, 20 bp, synthetic construct
  source 1..20: mol_type = other DNA
ctgtgatccacagaaaagta

SEQ ID NO: 3864 - DNA, 20 bp, synthetic construct
  source 1..20: mol_type = other DNA
gcccttcgcacttcttacac

SEQ ID NO: 3865 - DNA, 20 bp, synthetic construct
  source 1..20: mol_type = other DNA
gggagcgtaatcccaaggat

SEQ ID NO: 3866 - DNA, 20 bp, synthetic construct
  source 1..20: mol_type = other DNA
acctattggtaggccaatct

SEQ ID NO: 3867 - DNA, 20 bp, synthetic construct
  source 1..20: mol_type = other DNA
cctcgtcaatgaatactttg

SEQ ID NO: 3868 - DNA, 20 bp, synthetic construct
  source 1..20: mol_type = other DNA
cagtccttccacacgaccat

SEQ ID NO: 3869 - DNA, 20 bp, synthetic construct
  source 1..20: mol_type = other DNA
tacacgatccaagttaccag

SEQ ID NO: 3870 - DNA, 20 bp, synthetic construct
  source 1..20: mol_type = other DNA
ctcattgcgattgtggccct

SEQ ID NO: 3871 - DNA, 20 bp, synthetic construct
  source 1..20: mol_type = other DNA
ttggcgtgatgggatgaacg

SEQ ID NO: 3872 - DNA, 20 bp, synthetic construct
  source 1..20: mol_type = other DNA
acaactcgggatacaaattg

SEQ ID NO: 3873 - DNA, 20 bp, synthetic construct
  source 1..20: mol_type = other DNA
ttagcggcggattacccggc

SEQ ID NO: 3874 - DNA, 20 bp, synthetic construct
  source 1..20: mol_type = other DNA
cagccaagatgatagatacc

SEQ ID NO: 3875 - DNA, 20 bp, synthetic construct
  source 1..20: mol_type = other DNA
agcctaggttacggtggaac

SEQ ID NO: 3876 - DNA, 20 bp, synthetic construct
  source 1..20: mol_type = other DNA
tgtgttcccatgaagaagag

SEQ ID NO: 3877 - DNA, 20 bp, synthetic construct
  source 1..20: mol_type = other DNA
gaattgcctaatccaacaca

SEQ ID NO: 3878 - DNA, 20 bp, synthetic construct
  source 1..20: mol_type = other DNA
aattcacaaacttcagcagg

SEQ ID NO: 3879 - DNA, 20 bp, synthetic construct
  source 1..20: mol_type = other DNA
aaggcggcggccatggagat

SEQ ID NO: 3880 - DNA, 20 bp, synthetic construct
  source 1..20: mol_type = other DNA
cttggaaatgaacccatagg

SEQ ID NO: 3881 - DNA, 20 bp, synthetic construct
  source 1..20: mol_type = other DNA
ccaacaggtttcacagtaag

SEQ ID NO: 3882 - DNA, 20 bp, synthetic construct
  source 1..20: mol_type = other DNA
cgaaacaaaaagctggttgt

SEQ ID NO: 3883 - DNA, 20 bp, synthetic construct
  source 1..20: mol_type = other DNA
caagcttctcgaagtagcgc

SEQ ID NO: 3884 - DNA, 20 bp, synthetic construct
  source 1..20: mol_type = other DNA
tcacctgtgttgaaggtggc

SEQ ID NO: 3885 - DNA, 20 bp, synthetic construct
  source 1..20: mol_type = other DNA
gagtggtgagaggcacgtac

SEQ ID NO: 3886 - DNA, 20 bp, synthetic construct
  source 1..20: mol_type = other DNA
ccttgctttggaagctgatt

SEQ ID NO: 3887 - DNA, 20 bp, synthetic construct
  source 1..20: mol_type = other DNA
gacacaaagcaaccagggtc

SEQ ID NO: 3888 - DNA, 20 bp, synthetic construct
  source 1..20: mol_type = other DNA
cagcagttgtgtcaagcatg

SEQ ID NO: 3889 - DNA, 20 bp, synthetic construct
  source 1..20: mol_type = other DNA
gtccaccgtgtgctcagaac

SEQ ID NO: 3890 - DNA, 20 bp, synthetic construct
  source 1..20: mol_type = other DNA
gtcattgaagtctacctgga

SEQ ID NO: 3891 - DNA, 20 bp, synthetic construct
  source 1..20: mol_type = other DNA
aggtgccttgtcggtcatat

SEQ ID NO: 3892 - DNA, 20 bp, synthetic construct
  source 1..20: mol_type = other DNA
aaaactggacagcatttcac

SEQ ID NO: 3893 - DNA, 20 bp, synthetic construct
  source 1..20: mol_type = other DNA
tcgggactcgccatccgttc

SEQ ID NO: 3894 - DNA, 20 bp, synthetic construct
  source 1..20: mol_type = other DNA
gtatttacccaacgctgacg

SEQ ID NO: 3895 - DNA, 20 bp, synthetic construct
  source 1..20: mol_type = other DNA
caggagcaaactcttggtac

SEQ ID NO: 3896 - DNA, 20 bp, synthetic construct
  source 1..20: mol_type = other DNA
tctgggtagtacaatgcagg

SEQ ID NO: 3897 - DNA, 20 bp, synthetic construct
  source 1..20: mol_type = other DNA
ccgtagacatggtcttcgaa

SEQ ID NO: 3898 - DNA, 20 bp, synthetic construct
  source 1..20: mol_type = other DNA
tcagtgtggtacttcatgag

SEQ ID NO: 3899 - DNA, 20 bp, synthetic construct
  source 1..20: mol_type = other DNA
tagcgatgtctattacctgg

SEQ ID NO: 3900 - DNA, 20 bp, synthetic construct
  source 1..20: mol_type = other DNA
ggaaatgtgagcaattctgc

SEQ ID NO: 3901 - DNA, 20 bp, synthetic construct
  source 1..20: mol_type = other DNA
tcacacacgctgacctctaa

SEQ ID NO: 3902 - DNA, 20 bp, synthetic construct
  source 1..20: mol_type = other DNA
agctttctatcttagctgcc

SEQ ID NO: 3903 - DNA, 20 bp, synthetic construct
  source 1..20: mol_type = other DNA
gcttggatgttacacagacc

SEQ ID NO: 3904 - DNA, 20 bp, synthetic construct
  source 1..20: mol_type = other DNA
gtttacgttcagcatgatgg

SEQ ID NO: 3905 - DNA, 20 bp, synthetic construct
  source 1..20: mol_type = other DNA
gggcaaacagaaaatgcaca

SEQ ID NO: 3906 - DNA, 20 bp, synthetic construct
  source 1..20: mol_type = other DNA
attccacatacataggctct

SEQ ID NO: 3907 - DNA, 20 bp, synthetic construct
  source 1..20: mol_type = other DNA
tagtttcccaagtctggagc

SEQ ID NO: 3908 - DNA, 20 bp, synthetic construct
  source 1..20: mol_type = other DNA
gaggaaaatggtcttctaga

SEQ ID NO: 3909 - DNA, 20 bp, synthetic construct
  source 1..20: mol_type = other DNA
cccacatctgtagtactatc

SEQ ID NO: 3910 - DNA, 20 bp, synthetic construct
  source 1..20: mol_type = other DNA
gagagttcatcttcaaaacc

SEQ ID NO: 3911 - DNA, 20 bp, synthetic construct
  source 1..20: mol_type = other DNA
catttttgtggtccgcttga

SEQ ID NO: 3912 - DNA, 20 bp, synthetic construct
  source 1..20: mol_type = other DNA
ggaggcaacacctattcggg

SEQ ID NO: 3913 - DNA, 20 bp, synthetic construct
  source 1..20: mol_type = other DNA
aattcagccctaggctattg

SEQ ID NO: 3914 - DNA, 20 bp, synthetic construct
  source 1..20: mol_type = other DNA
aggctccttggcgaatattt

SEQ ID NO: 3915 - DNA, 20 bp, synthetic construct
  source 1..20: mol_type = other DNA
cttcggatccatcgagttgg

SEQ ID NO: 3916 - DNA, 20 bp, synthetic construct
  source 1..20: mol_type = other DNA
tacctggagtagactccatc

SEQ ID NO: 3917 - DNA, 20 bp, synthetic construct
  source 1..20: mol_type = other DNA
agggcagtgctgacgatggc

SEQ ID NO: 3918 - DNA, 20 bp, synthetic construct
  source 1..20: mol_type = other DNA
gtgtgtaggttttgttcagt

SEQ ID NO: 3919 - DNA, 20 bp, synthetic construct
  source 1..20: mol_type = other DNA
gcgagaaggaacagcacgcc

SEQ ID NO: 3920 - DNA, 20 bp, synthetic construct
  source 1..20: mol_type = other DNA
ggccagtcaccaacgacaaa

SEQ ID NO: 3921 - DNA, 20 bp, synthetic construct
  source 1..20: mol_type = other DNA
acaatctagcatggtccacc

SEQ ID NO: 3922 - DNA, 20 bp, synthetic construct
  source 1..20: mol_type = other DNA
gtgacaccggaaggaacgtc

SEQ ID NO: 3923 - DNA, 20 bp, synthetic construct
  source 1..20: mol_type = other DNA
tgaacgaaaagcctgagctt

SEQ ID NO: 3924 - DNA, 20 bp, synthetic construct
  source 1..20: mol_type = other DNA
ggtgcctgaaagttatatcg

SEQ ID NO: 3925 - DNA, 20 bp, synthetic construct
  source 1..20: mol_type = other DNA
gaagagggtgtcggatgaac

SEQ ID NO: 3926 - DNA, 20 bp, synthetic construct
  source 1..20: mol_type = other DNA
tagatccagtatgggtggag

SEQ ID NO: 3927 - DNA, 20 bp, synthetic construct
  source 1..20: mol_type = other DNA
gggccatatgtgtacttggt

SEQ ID NO: 3928 - DNA, 20 bp, synthetic construct
  source 1..20: mol_type = other DNA
cgagaggcatcgatgaactc

SEQ ID NO: 3929 - DNA, 20 bp, synthetic construct
  source 1..20: mol_type = other DNA
acaatgatatcattgccgct

SEQ ID NO: 3930 - DNA, 20 bp, synthetic construct
  source 1..20: mol_type = other DNA
ggtgtaagagcttaaccaca

SEQ ID NO: 3931 - DNA, 20 bp, synthetic construct
  source 1..20: mol_type = other DNA
cagcccatcaactggatagt

SEQ ID NO: 3932 - DNA, 20 bp, synthetic construct
  source 1..20: mol_type = other DNA
cgtcctgccgcttgaatggg

SEQ ID NO: 3933 - DNA, 20 bp, synthetic construct
  source 1..20: mol_type = other DNA
agtagttctttgcccacctg

SEQ ID NO: 3934 - DNA, 20 bp, synthetic construct
  source 1..20: mol_type = other DNA
gactcacgggtagcacaacg

SEQ ID NO: 3935 - DNA, 20 bp, synthetic construct
  source 1..20: mol_type = other DNA
ggcatgttcttgtcgcaggg

SEQ ID NO: 3936 - DNA, 20 bp, synthetic construct
  source 1..20: mol_type = other DNA
acgatgagctctgctcgcat

SEQ ID NO: 3937 - DNA, 20 bp, synthetic construct
  source 1..20: mol_type = other DNA
atcgtgagaagtcaatggcg

SEQ ID NO: 3938 - DNA, 20 bp, synthetic construct
  source 1..20: mol_type = other DNA
cacctacgctcttgctcgga

SEQ ID NO: 3939 - DNA, 20 bp, synthetic construct
  source 1..20: mol_type = other DNA
cacaaagcagtttacggcca

SEQ ID NO: 3940 - DNA, 20 bp, synthetic construct
  source 1..20: mol_type = other DNA
cagcttttagaccctgcatt

SEQ ID NO: 3941 - DNA, 20 bp, synthetic construct
  source 1..20: mol_type = other DNA
tcactagcagaagtgaactt

SEQ ID NO: 3942 - DNA, 20 bp, synthetic construct
  source 1..20: mol_type = other DNA
tcgagccggattatattggg

SEQ ID NO: 3943 - DNA, 20 bp, synthetic construct
  source 1..20: mol_type = other DNA
ggtgaacttgaagtgcttcc

SEQ ID NO: 3944 - DNA, 20 bp, synthetic construct
  source 1..20: mol_type = other DNA
tgagatggaacctatcaaag

SEQ ID NO: 3945 - DNA, 20 bp, synthetic construct
  source 1..20: mol_type = other DNA
gcccaaggaaattaatgaga

SEQ ID NO: 3946 - DNA, 20 bp, synthetic construct
  source 1..20: mol_type = other DNA
acaatgtaaacacaggcgtt

SEQ ID NO: 3947 - DNA, 20 bp, synthetic construct
  source 1..20: mol_type = other DNA
gagagtgacacatggtgagc

SEQ ID NO: 3948 - DNA, 20 bp, synthetic construct
  source 1..20: mol_type = other DNA
cggcgatactcaccactcga

SEQ ID NO: 3949 - DNA, 20 bp, synthetic construct
  source 1..20: mol_type = other DNA
ctcctctccattttcaggtc

SEQ ID NO: 3950 - DNA, 20 bp, synthetic construct
  source 1..20: mol_type = other DNA
aagacatgtgtcttccaacg

SEQ ID NO: 3951 - DNA, 20 bp, synthetic construct
  source 1..20: mol_type = other DNA
atagaatagaagcacagctg

SEQ ID NO: 3952 - DNA, 20 bp, synthetic construct
  source 1..20: mol_type = other DNA
gtgagatgtacttgaggtgt

SEQ ID NO: 3953 - DNA, 20 bp, synthetic construct
  source 1..20: mol_type = other DNA
ggctattgaggtcacgaatg

SEQ ID NO: 3954 - DNA, 20 bp, synthetic construct
  source 1..20: mol_type = other DNA
ctcttgcgcgcccacgaacg

SEQ ID NO: 3955 - DNA, 20 bp, synthetic construct
  source 1..20: mol_type = other DNA
tcatacttctgcctcatttc

SEQ ID NO: 3956 - DNA, 20 bp, synthetic construct
  source 1..20: mol_type = other DNA
tcagcttccactgttagacg

SEQ ID NO: 3957 - DNA, 20 bp, synthetic construct
  source 1..20: mol_type = other DNA
aggtgaacactgcactgaat

SEQ ID NO: 3958 - DNA, 20 bp, synthetic construct
  source 1..20: mol_type = other DNA
gattgcagacggtttgagga

SEQ ID NO: 3959 - DNA, 20 bp, synthetic construct
  source 1..20: mol_type = other DNA
cttctgtctccagcattgta

SEQ ID NO: 3960 - DNA, 20 bp, synthetic construct
  source 1..20: mol_type = other DNA
tcacaaggaagcgatcctga

SEQ ID NO: 3961 - DNA, 20 bp, synthetic construct
  source 1..20: mol_type = other DNA
tgtgtttgttttgcaccaag

SEQ ID NO: 3962 - DNA, 20 bp, synthetic construct
  source 1..20: mol_type = other DNA
gggtggccgggtacttttcc

SEQ ID NO: 3963 - DNA, 20 bp, synthetic construct
  source 1..20: mol_type = other DNA
gtaaccaacgtagccttggg

SEQ ID NO: 3964 - DNA, 20 bp, synthetic construct
  source 1..20: mol_type = other DNA
ggagtcaccgatgaatccac

SEQ ID NO: 3965 - DNA, 20 bp, synthetic construct
  source 1..20: mol_type = other DNA
gagcttgcatgaccagaacc

SEQ ID NO: 3966 - DNA, 20 bp, synthetic construct
  source 1..20: mol_type = other DNA
gatggtaccttctcggaagg

SEQ ID NO: 3967 - DNA, 20 bp, synthetic construct
  source 1..20: mol_type = other DNA
ctccgtggcgaggtaggtgc

SEQ ID NO: 3968 - DNA, 20 bp, synthetic construct
  source 1..20: mol_type = other DNA
ggtgatgggtgtcagggttg

SEQ ID NO: 3969 - DNA, 20 bp, synthetic construct
  source 1..20: mol_type = other DNA
tgttctcggtgacgatgcgg

SEQ ID NO: 3970 - DNA, 20 bp, synthetic construct
  source 1..20: mol_type = other DNA
gtggacagctcgctcgtgag

SEQ ID NO: 3971 - DNA, 20 bp, synthetic construct
  source 1..20: mol_type = other DNA
aagatgtagttgcacgtccc

SEQ ID NO: 3972 - DNA, 20 bp, synthetic construct
  source 1..20: mol_type = other DNA
ggtcaggaaccgtgtggtag

SEQ ID NO: 3973 - DNA, 20 bp, synthetic construct
  source 1..20: mol_type = other DNA
aagcacagtgggttcgtttc

SEQ ID NO: 3974 - DNA, 20 bp, synthetic construct
  source 1..20: mol_type = other DNA
gggccgcgtctcttgggctt

SEQ ID NO: 3975 - DNA, 20 bp, synthetic construct
  source 1..20: mol_type = other DNA
tctaccggcgcaaaagaata

SEQ ID NO: 3976 - DNA, 20 bp, synthetic construct
  source 1..20: mol_type = other DNA
cgctgagagaccaaacattg

SEQ ID NO: 3977 - DNA, 20 bp, synthetic construct
  source 1..20: mol_type = other DNA
tagccattgcctatatccta

SEQ ID NO: 3978 - DNA, 20 bp, synthetic construct
  source 1..20: mol_type = other DNA
acagccattgttacatgcct

SEQ ID NO: 3979 - DNA, 20 bp, synthetic construct
  source 1..20: mol_type = other DNA
agccttctaacaagccaagt

SEQ ID NO: 3980 - DNA, 20 bp, synthetic construct
  source 1..20: mol_type = other DNA
tttgagtatgtagggtcttc

SEQ ID NO: 3981 - DNA, 20 bp, synthetic construct
  source 1..20: mol_type = other DNA
cagtaaaaccttcatcgagg

SEQ ID NO: 3982 - DNA, 20 bp, synthetic construct
  source 1..20: mol_type = other DNA
agccaccgccaatatcaagc

SEQ ID NO: 3983 - DNA, 20 bp, synthetic construct
  source 1..20: mol_type = other DNA
tggcaaggacattgtttttg

SEQ ID NO: 3984 - DNA, 20 bp, synthetic construct
  source 1..20: mol_type = other DNA
gcgttagaagcagatggttt

SEQ ID NO: 3985 - DNA, 20 bp, synthetic construct
  source 1..20: mol_type = other DNA
cagggtaggaaggacgctca

SEQ ID NO: 3986 - DNA, 20 bp, synthetic construct
  source 1..20: mol_type = other DNA
tgttatttcgagtcgtcacg

SEQ ID NO: 3987 - DNA, 20 bp, synthetic construct
  source 1..20: mol_type = other DNA
ggcaattctctcaggcttgc

SEQ ID NO: 3988 - DNA, 20 bp, synthetic construct
  source 1..20: mol_type = other DNA
tgggcacagcgggacgaatc

SEQ ID NO: 3989 - DNA, 20 bp, synthetic construct
  source 1..20: mol_type = other DNA
ccagggaccacccggtatgt

SEQ ID NO: 3990 - DNA, 20 bp, synthetic construct
  source 1..20: mol_type = other DNA
ccgaaccctagactcaggtg

SEQ ID NO: 3991 - DNA, 20 bp, synthetic construct
  source 1..20: mol_type = other DNA
ggtggcataaatgtgggcat

SEQ ID NO: 3992 - DNA, 20 bp, synthetic construct
  source 1..20: mol_type = other DNA
aagaagacactcaccacact

SEQ ID NO: 3993 - DNA, 20 bp, synthetic construct
  source 1..20: mol_type = other DNA
ttcttcctccagaaaaactg

SEQ ID NO: 3994 - DNA, 20 bp, synthetic construct
  source 1..20: mol_type = other DNA
gtgacattggtgatgagtgg

SEQ ID NO: 3995 - DNA, 20 bp, synthetic construct
  source 1..20: mol_type = other DNA
acacgttcactatcaagagc

SEQ ID NO: 3996 - DNA, 20 bp, synthetic construct
  source 1..20: mol_type = other DNA
ctggcatttagcccagacat

SEQ ID NO: 3997 - DNA, 20 bp, synthetic construct
  source 1..20: mol_type = other DNA
gagtctgggttcattgatag

SEQ ID NO: 3998 - DNA, 20 bp, synthetic construct
  source 1..20: mol_type = other DNA
acaaatcaccaacagggaga

SEQ ID NO: 3999 - DNA, 20 bp, synthetic construct
  source 1..20: mol_type = other DNA
tgaccgcaggctagttttca

SEQ ID NO: 4000 - DNA, 20 bp, synthetic construct
  source 1..20: mol_type = other DNA
gatcactttcaacctgtcac

SEQ ID NO: 4001 - DNA, 20 bp, synthetic construct
  source 1..20: mol_type = other DNA
catcgtgttctgcagcgtgc

SEQ ID NO: 4002 - DNA, 20 bp, synthetic construct
  source 1..20: mol_type = other DNA
gaacgttttggaaagaagcg

SEQ ID NO: 4003 - DNA, 20 bp, synthetic construct
  source 1..20: mol_type = other DNA
aggctctttgtgtactcgtc

SEQ ID NO: 4004 - DNA, 20 bp, synthetic construct
  source 1..20: mol_type = other DNA
ctttttgaacacttgacggc

SEQ ID NO: 4005 - DNA, 20 bp, synthetic construct
  source 1..20: mol_type = other DNA
agttgagttggagagatggt

SEQ ID NO: 4006 - DNA, 20 bp, synthetic construct
  source 1..20: mol_type = other DNA
gaccttactagcgcttcttt

SEQ ID NO: 4007 - DNA, 20 bp, synthetic construct
  source 1..20: mol_type = other DNA
tatacagggattgtaagacc

SEQ ID NO: 4008 - DNA, 20 bp, synthetic construct
  source 1..20: mol_type = other DNA
cacaaggtagaggtttgcca

SEQ ID NO: 4009 - DNA, 20 bp, synthetic construct
  source 1..20: mol_type = other DNA
ctgtgggctgcggcagtaaa

SEQ ID NO: 4010 - DNA, 20 bp, synthetic construct
  source 1..20: mol_type = other DNA
ctggcaaaaggtgatactac

SEQ ID NO: 4011 - DNA, 20 bp, synthetic construct
  source 1..20: mol_type = other DNA
ctcactttaaagccaagact

SEQ ID NO: 4012 - DNA, 20 bp, synthetic construct
  source 1..20: mol_type = other DNA
actatcttccacgaatcttg

SEQ ID NO: 4013 - DNA, 20 bp, synthetic construct
  source 1..20: mol_type = other DNA
atctgtgaactcgggtttgg

SEQ ID NO: 4014 - DNA, 20 bp, synthetic construct
  source 1..20: mol_type = other DNA
tgcccgaatatcgggaaaag

SEQ ID NO: 4015 - DNA, 20 bp, synthetic construct
  source 1..20: mol_type = other DNA
aaggaaggccctagcgtccc

SEQ ID NO: 4016 - DNA, 20 bp, synthetic construct
  source 1..20: mol_type = other DNA
cagcatagcggtcacagttc

SEQ ID NO: 4017 - DNA, 20 bp, synthetic construct
  source 1..20: mol_type = other DNA
agggccgccttaagtccatg

SEQ ID NO: 4018 - DNA, 20 bp, synthetic construct
  source 1..20: mol_type = other DNA
acaaggtccatcaatgtttc

SEQ ID NO: 4019 - DNA, 20 bp, synthetic construct
  source 1..20: mol_type = other DNA
agctcaggtaatcgagacgc

SEQ ID NO: 4020 - DNA, 20 bp, synthetic construct
  source 1..20: mol_type = other DNA
aagcccttggtgatattttg

SEQ ID NO: 4021 - DNA, 20 bp, synthetic construct
  source 1..20: mol_type = other DNA
cggagttcagcgtgaagatg

SEQ ID NO: 4022 - DNA, 20 bp, synthetic construct
  source 1..20: mol_type = other DNA
tatgcgcacatacatacaca

SEQ ID NO: 4023 - DNA, 20 bp, synthetic construct
  source 1..20: mol_type = other DNA
cagttgaagaagctgaagaa

SEQ ID NO: 4024 - DNA, 20 bp, synthetic construct
  source 1..20: mol_type = other DNA
caatgaggttccaagtctca

SEQ ID NO: 4025 - DNA, 20 bp, synthetic construct
  source 1..20: mol_type = other DNA
gtcgtcattgcactcaggaa

SEQ ID NO: 4026 - DNA, 20 bp, synthetic construct
  source 1..20: mol_type = other DNA
acctgttcagtccaaagggt

SEQ ID NO: 4027 - DNA, 20 bp, synthetic construct
  source 1..20: mol_type = other DNA
gcagagctggcattcattcg

SEQ ID NO: 4028 - DNA, 20 bp, synthetic construct
  source 1..20: mol_type = other DNA
ggtgccatagccgggtttga

SEQ ID NO: 4029 - DNA, 20 bp, synthetic construct
  source 1..20: mol_type = other DNA
ttgatccagtcccgaaacag

SEQ ID NO: 4030 - DNA, 20 bp, synthetic construct
  source 1..20: mol_type = other DNA
ggatgccgccgctcagtgtt

SEQ ID NO: 4031 - DNA, 20 bp, synthetic construct
  source 1..20: mol_type = other DNA
tggaaggcattttcctagcg

SEQ ID NO: 4032 - DNA, 20 bp, synthetic construct
  source 1..20: mol_type = other DNA
ggaccagaacgtgaagatgt

SEQ ID NO: 4033 - DNA, 20 bp, synthetic construct
  source 1..20: mol_type = other DNA
ggatgtgggctgttgaaatg

SEQ ID NO: 4034 - DNA, 20 bp, synthetic construct
  source 1..20: mol_type = other DNA
atggcagcgctctccttaag

SEQ ID NO: 4035 - DNA, 20 bp, synthetic construct
  source 1..20: mol_type = other DNA
gagtggttgtgaaataaagg

SEQ ID NO: 4036 - DNA, 20 bp, synthetic construct
  source 1..20: mol_type = other DNA
tgcagatctggttttctgtt

SEQ ID NO: 4037 - DNA, 20 bp, synthetic construct
  source 1..20: mol_type = other DNA
gtagttgcacttggcgttct

SEQ ID NO: 4038 - DNA, 20 bp, synthetic construct
  source 1..20: mol_type = other DNA
cagctgtttggagaacatgt

SEQ ID NO: 4039 - DNA, 20 bp, synthetic construct
  source 1..20: mol_type = other DNA
gactcttgggagaccgaata

SEQ ID NO: 4040 - DNA, 20 bp, synthetic construct
  source 1..20: mol_type = other DNA
ttactagaagttaggagctg

SEQ ID NO: 4041 - DNA, 20 bp, synthetic construct
  source 1..20: mol_type = other DNA
ggatccagcaatatcatatg

SEQ ID NO: 4042 - DNA, 20 bp, synthetic construct
  source 1..20: mol_type = other DNA
ctggtagattcacagagaga

SEQ ID NO: 4043 - DNA, 20 bp, synthetic construct
  source 1..20: mol_type = other DNA
acatcttccaattgtgggat

SEQ ID NO: 4044 - DNA, 20 bp, synthetic construct
  source 1..20: mol_type = other DNA
acagcaatcaatatgtccac

SEQ ID NO: 4045 - DNA, 20 bp, synthetic construct
  source 1..20: mol_type = other DNA
gtgctagctgctgtatgtac

SEQ ID NO: 4046 - DNA, 20 bp, synthetic construct
  source 1..20: mol_type = other DNA
ccactgaacgcatgatgtct

SEQ ID NO: 4047 - DNA, 20 bp, synthetic construct
  source 1..20: mol_type = other DNA
gcagagtacaggaaccactc

SEQ ID NO: 4048 - DNA, 20 bp, synthetic construct
  source 1..20: mol_type = other DNA
ggctgggcaccgatgataaa

SEQ ID NO: 4049 - DNA, 20 bp, synthetic construct
  source 1..20: mol_type = other DNA
ggatcacaggcagtcctcta

SEQ ID NO: 4050 - DNA, 20 bp, synthetic construct
  source 1..20: mol_type = other DNA
agatttggatgtctgtagtg

SEQ ID NO: 4051 - DNA, 20 bp, synthetic construct
  source 1..20: mol_type = other DNA
aaaaaatcagggcttacacc

SEQ ID NO: 4052 - DNA, 20 bp, synthetic construct
  source 1..20: mol_type = other DNA
ccaagggtgacggaagtctc

SEQ ID NO: 4053 - DNA, 20 bp, synthetic construct
  source 1..20: mol_type = other DNA
aagaggttcaacgtggtcat

SEQ ID NO: 4054 - DNA, 20 bp, synthetic construct
  source 1..20: mol_type = other DNA
gcctgcgggctgcgtctagt

SEQ ID NO: 4055 - DNA, 20 bp, synthetic construct
  source 1..20: mol_type = other DNA
gtacgttgccttgtactttt

SEQ ID NO: 4056 - DNA, 20 bp, synthetic construct
  source 1..20: mol_type = other DNA
gctcttgacaaaggcggttc

SEQ ID NO: 4057 - DNA, 20 bp, synthetic construct
  source 1..20: mol_type = other DNA
ctgctttgatctgttgacgc

SEQ ID NO: 4058 - DNA, 20 bp, synthetic construct
  source 1..20: mol_type = other DNA
ccataatcctgatcaatgcc

SEQ ID NO: 4059 - DNA, 20 bp, synthetic construct
  source 1..20: mol_type = other DNA
gtggaacttctgtactacaa

SEQ ID NO: 4060 - DNA, 20 bp, synthetic construct
  source 1..20: mol_type = other DNA
tcacagtaaaccttccatct

SEQ ID NO: 4061 - DNA, 20 bp, synthetic construct
  source 1..20: mol_type = other DNA
cgtcattgtctctgtcatac

SEQ ID NO: 4062 - DNA, 20 bp, synthetic construct
  source 1..20: mol_type = other DNA
ttcagagtctaagctaagga

SEQ ID NO: 4063 - DNA, 20 bp, synthetic construct
  source 1..20: mol_type = other DNA
ctgttctgagaaacaggata

SEQ ID NO: 4064 - DNA, 20 bp, synthetic construct
  source 1..20: mol_type = other DNA
ccagtggtgatgccgacgat

SEQ ID NO: 4065 - DNA, 20 bp, synthetic construct
  source 1..20: mol_type = other DNA
cttgttggtgaatcttgtcc

SEQ ID NO: 4066 - DNA, 20 bp, synthetic construct
  source 1..20: mol_type = other DNA
ttcaggccattgcggcaacc

SEQ ID NO: 4067 - DNA, 20 bp, synthetic construct
  source 1..20: mol_type = other DNA
cctgtgctcccgtccagtcc

SEQ ID NO: 4068 - DNA, 20 bp, synthetic construct
  source 1..20: mol_type = other DNA
tccaaatgatgagcttggga

SEQ ID NO: 4069 - DNA, 20 bp, synthetic construct
  source 1..20: mol_type = other DNA
atgttgatggttgggaaggt

SEQ ID NO: 4070 - DNA, 20 bp, synthetic construct
  source 1..20: mol_type = other DNA
tctgctatatgctaaggtcc

SEQ ID NO: 4071 - DNA, 20 bp, synthetic construct
  source 1..20: mol_type = other DNA
gtttaaaatatctcccgcct

SEQ ID NO: 4072 - DNA, 20 bp, synthetic construct
  source 1..20: mol_type = other DNA
gactgcagcagacgcccata

SEQ ID NO: 4073 - DNA, 20 bp, synthetic construct
  source 1..20: mol_type = other DNA
caccgacatatttatggagg

SEQ ID NO: 4074 - DNA, 20 bp, synthetic construct
  source 1..20: mol_type = other DNA
acttccaatgccttaactga

SEQ ID NO: 4075 - DNA, 20 bp, synthetic construct
  source 1..20: mol_type = other DNA
tgaatgttaagaggcaaccc

SEQ ID NO: 4076 - DNA, 20 bp, synthetic construct
  source 1..20: mol_type = other DNA
tccggtacaggcagcgtagg

SEQ ID NO: 4077 - DNA, 20 bp, synthetic construct
  source 1..20: mol_type = other DNA
tcacagctcgaggcaccgta

SEQ ID NO: 4078 - DNA, 20 bp, synthetic construct
  source 1..20: mol_type = other DNA
tggctttgaggtaggcatac

SEQ ID NO: 4079 - DNA, 20 bp, synthetic construct
  source 1..20: mol_type = other DNA
gtgtcgggattccgatgacc

SEQ ID NO: 4080 - DNA, 20 bp, synthetic construct
  source 1..20: mol_type = other DNA
gctgttcaagtttgtgtttc

SEQ ID NO: 4081 - DNA, 20 bp, synthetic construct
  source 1..20: mol_type = other DNA
cgggatctggtcacgcaggg

SEQ ID NO: 4082 - DNA, 20 bp, synthetic construct
  source 1..20: mol_type = other DNA
tgaagttcttatgtaccgga

SEQ ID NO: 4083 - DNA, 20 bp, synthetic construct
  source 1..20: mol_type = other DNA
agtaacggcgacgctacacg

SEQ ID NO: 4084 - DNA, 20 bp, synthetic construct
  source 1..20: mol_type = other DNA
caggtagatttccgggagca

SEQ ID NO: 4085 - DNA, 20 bp, synthetic construct
  source 1..20: mol_type = other DNA
gccgtgatgaccgggttctg

SEQ ID NO: 4086 - DNA, 20 bp, synthetic construct
  source 1..20: mol_type = other DNA
atcttgaagatcgccgcact

SEQ ID NO: 4087 - DNA, 20 bp, synthetic construct
  source 1..20: mol_type = other DNA
ctcacagtctctggttatag

SEQ ID NO: 4088 - DNA, 20 bp, synthetic construct
  source 1..20: mol_type = other DNA
catgacatccgaagggtttt

SEQ ID NO: 4089 - DNA, 20 bp, synthetic construct
  source 1..20: mol_type = other DNA
gcagctgatggagcagtcat

SEQ ID NO: 4090 - DNA, 20 bp, synthetic construct
  source 1..20: mol_type = other DNA
taagacagcacttcgttcag

SEQ ID NO: 4091 - DNA, 20 bp, synthetic construct
  source 1..20: mol_type = other DNA
tgcactggtgttactgtcag

SEQ ID NO: 4092 - DNA, 20 bp, synthetic construct
  source 1..20: mol_type = other DNA
ttcatactggtcagtccata

SEQ ID NO: 4093 - DNA, 20 bp, synthetic construct
  source 1..20: mol_type = other DNA
caaattgctgtcgtaacatg

SEQ ID NO: 4094 - DNA, 20 bp, synthetic construct
  source 1..20: mol_type = other DNA
acagaatgtaggtaccaaag

SEQ ID NO: 4095 - DNA, 20 bp, synthetic construct
  source 1..20: mol_type = other DNA
gtaggcctgataagcaggtc

SEQ ID NO: 4096 - DNA, 20 bp, synthetic construct
  source 1..20: mol_type = other DNA
acaccatcgtaagtcaagta

SEQ ID NO: 4097 - DNA, 20 bp, synthetic construct
  source 1..20: mol_type = other DNA
aactccctctacctaaccag

SEQ ID NO: 4098 - DNA, 20 bp, synthetic construct
  source 1..20: mol_type = other DNA
agaactaggatttgcttcca

SEQ ID NO: 4099 - DNA, 20 bp, synthetic construct
  source 1..20: mol_type = other DNA
tgaggccaccagaaaataaa

SEQ ID NO: 4100 - DNA, 20 bp, synthetic construct
  source 1..20: mol_type = other DNA
cataacacagtttctccttg

SEQ ID NO: 4101 - DNA, 20 bp, synthetic construct
  source 1..20: mol_type = other DNA
cctgtgccttataggattga

SEQ ID NO: 4102 - DNA, 20 bp, synthetic construct
  source 1..20: mol_type = other DNA
acaaaggaataaccctgccc

SEQ ID NO: 4103 - DNA, 20 bp, synthetic construct
  source 1..20: mol_type = other DNA
ggtgtgtcctgatttgaata

SEQ ID NO: 4104 - DNA, 20 bp, synthetic construct
  source 1..20: mol_type = other DNA
ctgattagtcagttgcgaaa

SEQ ID NO: 4105 - DNA, 20 bp, synthetic construct
  source 1..20: mol_type = other DNA
ttggtcatggatgtttgctc

SEQ ID NO: 4106 - DNA, 20 bp, synthetic construct
  source 1..20: mol_type = other DNA
tgtatgtgcagttaggcact

SEQ ID NO: 4107 - DNA, 20 bp, synthetic construct
  source 1..20: mol_type = other DNA
aagcccagggcagaaccgat

SEQ ID NO: 4108 - DNA, 20 bp, synthetic construct
  source 1..20: mol_type = other DNA
tgtccctctgcttctaaata

SEQ ID NO: 4109 - DNA, 20 bp, synthetic construct
  source 1..20: mol_type = other DNA
tttttctcgatgttctggcg

SEQ ID NO: 4110 - DNA, 20 bp, synthetic construct
  source 1..20: mol_type = other DNA
gtccgtgacaggtcgctttc

SEQ ID NO: 4111 - DNA, 20 bp, synthetic construct
  source 1..20: mol_type = other DNA
gttcaggaggtgaattagtg

SEQ ID NO: 4112 - DNA, 20 bp, synthetic construct
  source 1..20: mol_type = other DNA
gtccacaaagctgaacatgt

SEQ ID NO: 4113 - DNA, 20 bp, synthetic construct
  source 1..20: mol_type = other DNA
gtccaagacgatgttaatga

SEQ ID NO: 4114 - DNA, 20 bp, synthetic construct
  source 1..20: mol_type = other DNA
aggccctgattacccagaat

SEQ ID NO: 4115 - DNA, 20 bp, synthetic construct
  source 1..20: mol_type = other DNA
ctggcctcactggcaaatcg

SEQ ID NO: 4116 - DNA, 20 bp, synthetic construct
  source 1..20: mol_type = other DNA
catatggaggtgggcagtaa

SEQ ID NO: 4117 - DNA, 20 bp, synthetic construct
  source 1..20: mol_type = other DNA
ccgaggtgccaaattcaaag

SEQ ID NO: 4118 - DNA, 20 bp, synthetic construct
  source 1..20: mol_type = other DNA
tagtcatgatactgctggta

SEQ ID NO: 4119 - DNA, 20 bp, synthetic construct
  source 1..20: mol_type = other DNA
atgccatccatgcctgagac

SEQ ID NO: 4120 - DNA, 20 bp, synthetic construct
  source 1..20: mol_type = other DNA
cccagaaccgtccttcagat

SEQ ID NO: 4121 - DNA, 20 bp, synthetic construct
  source 1..20: mol_type = other DNA
cagacaagtgcatagtactt

SEQ ID NO: 4122 - DNA, 20 bp, synthetic construct
  source 1..20: mol_type = other DNA
acactggtagccaaccatga

SEQ ID NO: 4123 - DNA, 20 bp, synthetic construct
  source 1..20: mol_type = other DNA
gatgttgaagcaggtctcgt

SEQ ID NO: 4124 - DNA, 20 bp, synthetic construct
  source 1..20: mol_type = other DNA
gcggcagttgaaggaaccaa

SEQ ID NO: 4125 - DNA, 20 bp, synthetic construct
  source 1..20: mol_type = other DNA
tccaagttttgacaggtacc

SEQ ID NO: 4126 - DNA, 20 bp, synthetic construct
  source 1..20: mol_type = other DNA
cggaacttgacggtgttccc

SEQ ID NO: 4127 - DNA, 20 bp, synthetic construct
  source 1..20: mol_type = other DNA
ccagtttgaagctactatca

SEQ ID NO: 4128 - DNA, 20 bp, synthetic construct
  source 1..20: mol_type = other DNA
tgcactctgtagtctggagc

SEQ ID NO: 4129 - DNA, 20 bp, synthetic construct
  source 1..20: mol_type = other DNA
gggtgctctggaaagttcgc

SEQ ID NO: 4130 - DNA, 20 bp, synthetic construct
  source 1..20: mol_type = other DNA
gaaggccctcgcgttctgcg

SEQ ID NO: 4131 - DNA, 20 bp, synthetic construct
  source 1..20: mol_type = other DNA
aaggtcctttccaacaaaga

SEQ ID NO: 4132 - DNA, 20 bp, synthetic construct
  source 1..20: mol_type = other DNA
acacctactgaaaataacgg

SEQ ID NO: 4133 - DNA, 20 bp, synthetic construct
  source 1..20: mol_type = other DNA
ctcacaggccggctctttcg

SEQ ID NO: 4134 - DNA, 20 bp, synthetic construct
  source 1..20: mol_type = other DNA
tctttttgtatgctgagcct

SEQ ID NO: 4135 - DNA, 20 bp, synthetic construct
  source 1..20: mol_type = other DNA
tctccagtgagatacgcgat

SEQ ID NO: 4136 - DNA, 20 bp, synthetic construct
  source 1..20: mol_type = other DNA
caccttcctaccaacgtccg

SEQ ID NO: 4137 - DNA, 20 bp, synthetic construct
  source 1..20: mol_type = other DNA
tgtatttcttcagttctggc

SEQ ID NO: 4138 - DNA, 20 bp, synthetic construct
  source 1..20: mol_type = other DNA
catgaaggttttgctgctgt

SEQ ID NO: 4139 - DNA, 20 bp, synthetic construct
  source 1..20: mol_type = other DNA
atgaagagatgaatggagcg

SEQ ID NO: 4140 - DNA, 20 bp, synthetic construct
  source 1..20: mol_type = other DNA
aggcgcgcacagacagaaga

SEQ ID NO: 4141 - DNA, 20 bp, synthetic construct
  source 1..20: mol_type = other DNA
tacatatccggtggaagact

SEQ ID NO: 4142 - DNA, 20 bp, synthetic construct
  source 1..20: mol_type = other DNA
cttggctgatttccatgcaa

SEQ ID NO: 4143 - DNA, 20 bp, synthetic construct
  source 1..20: mol_type = other DNA
tatgggatctttggtggtga

SEQ ID NO: 4144 - DNA, 20 bp, synthetic construct
  source 1..20: mol_type = other DNA
ctgtttcaacttggtccttg

SEQ ID NO: 4145 - DNA, 20 bp, synthetic construct
  source 1..20: mol_type = other DNA
ctctgaggacgactcgctct

SEQ ID NO: 4146 - DNA, 20 bp, synthetic construct
  source 1..20: mol_type = other DNA
cacggtaactgaagatgctt

SEQ ID NO: 4147 - DNA, 20 bp, synthetic construct
  source 1..20: mol_type = other DNA
ggagaaaattcacatgaggg

SEQ ID NO: 4148 - DNA, 20 bp, synthetic construct
  source 1..20: mol_type = other DNA
tgtgttcttgagctgctttt

SEQ ID NO: 4149 - DNA, 20 bp, synthetic construct
  source 1..20: mol_type = other DNA
ggcttggatgccatcaatgt

SEQ ID NO: 4150 - DNA, 20 bp, synthetic construct
  source 1..20: mol_type = other DNA
ggacataagtgacctggttg

SEQ ID NO: 4151 - DNA, 20 bp, synthetic construct
  source 1..20: mol_type = other DNA
ctgaggacaggatccaccgg

SEQ ID NO: 4152 - DNA, 20 bp, synthetic construct
  source 1..20: mol_type = other DNA
ttcaacgctcactgcaaaca

SEQ ID NO: 4153 - DNA, 20 bp, synthetic construct
  source 1..20: mol_type = other DNA
cactcagccttggcaagtag

SEQ ID NO: 4154 - DNA, 20 bp, synthetic construct
  source 1..20: mol_type = other DNA
ctcggcctcgttaagcatcc

SEQ ID NO: 4155 - DNA, 20 bp, synthetic construct
  source 1..20: mol_type = other DNA
ccagtttatcataagcggcc

SEQ ID NO: 4156 - DNA, 20 bp, synthetic construct
  source 1..20: mol_type = other DNA
agcctgaagaactgtccact

SEQ ID NO: 4157 - DNA, 20 bp, synthetic construct
  source 1..20: mol_type = other DNA
gtactgggtcggtcattagg

SEQ ID NO: 4158 - DNA, 20 bp, synthetic construct
  source 1..20: mol_type = other DNA
tcatttctgacaggtgtgtg

SEQ ID NO: 4159 - DNA, 20 bp, synthetic construct
  source 1..20: mol_type = other DNA
gtgagtgagcggcctccagc

SEQ ID NO: 4160 - DNA, 20 bp, synthetic construct
  source 1..20: mol_type = other DNA
ctcacttccaagaccgtcac

SEQ ID NO: 4161 - DNA, 20 bp, synthetic construct
  source 1..20: mol_type = other DNA
aaagatgaatagttcctcgg

SEQ ID NO: 4162 - DNA, 20 bp, synthetic construct
  source 1..20: mol_type = other DNA
tggcacaaagatgtagagcc

SEQ ID NO: 4163 - DNA, 20 bp, synthetic construct
  source 1..20: mol_type = other DNA
ggtgcagtggagtatgtata

SEQ ID NO: 4164 - DNA, 20 bp, synthetic construct
  source 1..20: mol_type = other DNA
aatgatcctagcttgacatc

SEQ ID NO: 4165 - DNA, 20 bp, synthetic construct
  source 1..20: mol_type = other DNA
ggaagtaacgcagatccgaa

SEQ ID NO: 4166 - DNA, 20 bp, synthetic construct
  source 1..20: mol_type = other DNA
cgcaggtgggcaagcgagtt

SEQ ID NO: 4167 - DNA, 20 bp, synthetic construct
  source 1..20: mol_type = other DNA
tgttcctgtatcaagcactg

SEQ ID NO: 4168 - DNA, 20 bp, synthetic construct
  source 1..20: mol_type = other DNA
caccacgttgtcagtaacgc

SEQ ID NO: 4169 - DNA, 20 bp, synthetic construct
  source 1..20: mol_type = other DNA
agcttgtgtaaacacaagcg

SEQ ID NO: 4170 - DNA, 20 bp, synthetic construct
  source 1..20: mol_type = other DNA
gaattaatttaaggaggcgc

SEQ ID NO: 4171 - DNA, 20 bp, synthetic construct
  source 1..20: mol_type = other DNA
cgctctgtgctgaagaccac

SEQ ID NO: 4172 - DNA, 20 bp, synthetic construct
  source 1..20: mol_type = other DNA
gacgcaggaaagttggctcg

SEQ ID NO: 4173 - DNA, 20 bp, synthetic construct
  source 1..20: mol_type = other DNA
cattgtacggaatgacaagg

SEQ ID NO: 4174 - DNA, 20 bp, synthetic construct
  source 1..20: mol_type = other DNA
gtcgttgttgttgccgtggc

SEQ ID NO: 4175 - DNA, 20 bp, synthetic construct
  source 1..20: mol_type = other DNA
cttcctttgcactgtacact

SEQ ID NO: 4176 - DNA, 20 bp, synthetic construct
  source 1..20: mol_type = other DNA
gcaggtagcatgttgtgcgg

SEQ ID NO: 4177 - DNA, 20 bp, synthetic construct
  source 1..20: mol_type = other DNA
agccatcttgatcttcaggg

SEQ ID NO: 4178 - DNA, 20 bp, synthetic construct
  source 1..20: mol_type = other DNA
tagtccataccctgttgcac

SEQ ID NO: 4179 - DNA, 20 bp, synthetic construct
  source 1..20: mol_type = other DNA
gcacctctcatcattccaca

SEQ ID NO: 4180 - DNA, 20 bp, synthetic construct
  source 1..20: mol_type = other DNA
tccactgcccttgagtggtg

SEQ ID NO: 4181 - DNA, 20 bp, synthetic construct
  source 1..20: mol_type = other DNA
caaactcaggcaaacagcag

SEQ ID NO: 4182 - DNA, 20 bp, synthetic construct
  source 1..20: mol_type = other DNA
cagttctccgctcacgaggg

SEQ ID NO: 4183 - DNA, 20 bp, synthetic construct
  source 1..20: mol_type = other DNA
cgcatgtcactcaaggcggg

SEQ ID NO: 4184 - DNA, 20 bp, synthetic construct
  source 1..20: mol_type = other DNA
tcatctttcagtgtgggtgc

SEQ ID NO: 4185 - DNA, 20 bp, synthetic construct
  source 1..20: mol_type = other DNA
gtcagtcaaacgtgaagccc

SEQ ID NO: 4186 - DNA, 20 bp, synthetic construct
  source 1..20: mol_type = other DNA
gatgctgcacacattcagct

SEQ ID NO: 4187 - DNA, 20 bp, synthetic construct
  source 1..20: mol_type = other DNA
gaagatgcaggctcaaagtc

SEQ ID NO: 4188 - DNA, 20 bp, synthetic construct
  source 1..20: mol_type = other DNA
aggcatccaccatacttgaa

SEQ ID NO: 4189 - DNA, 20 bp, synthetic construct
  source 1..20: mol_type = other DNA
gtcaccaaatggaatcaaag

SEQ ID NO: 4190 - DNA, 20 bp, synthetic construct
  source 1..20: mol_type = other DNA
gagagaaagacatagtgatc

SEQ ID NO: 4191 - DNA, 20 bp, synthetic construct
  source 1..20: mol_type = other DNA
ggctagataccattcaccat

SEQ ID NO: 4192 - DNA, 20 bp, synthetic construct
  source 1..20: mol_type = other DNA
gcaccctgcagacggcattc

SEQ ID NO: 4193 - DNA, 20 bp, synthetic construct
  source 1..20: mol_type = other DNA
tggcatccgacagccacccg

SEQ ID NO: 4194 - DNA, 20 bp, synthetic construct
  source 1..20: mol_type = other DNA
ctcttcttgcaaagattcca

SEQ ID NO: 4195 - DNA, 20 bp, synthetic construct
  source 1..20: mol_type = other DNA
tgcaggcggccaatagtgtc

SEQ ID NO: 4196 - DNA, 20 bp, synthetic construct
  source 1..20: mol_type = other DNA
ggctgcaggcaccattatgg

SEQ ID NO: 4197 - DNA, 20 bp, synthetic construct
  source 1..20: mol_type = other DNA
tttgacgcatttcccgcttt

SEQ ID NO: 4198 - DNA, 20 bp, synthetic construct
  source 1..20: mol_type = other DNA
gctgtcagtgaagccgaaaa

SEQ ID NO: 4199 - DNA, 20 bp, synthetic construct
  source 1..20: mol_type = other DNA
aaacccacccatgaactgca

SEQ ID NO: 4200 - DNA, 20 bp, synthetic construct
  source 1..20: mol_type = other DNA
gccatccagacacagaaaca

SEQ ID NO: 4201 - DNA, 20 bp, synthetic construct
  source 1..20: mol_type = other DNA
cagccggccacgcaacaggt

SEQ ID NO: 4202 - DNA, 20 bp, synthetic construct
  source 1..20: mol_type = other DNA
ccatcggccacaggcacact

SEQ ID NO: 4203 - DNA, 20 bp, synthetic construct
  source 1..20: mol_type = other DNA
aaagaggtcaacagtctgga

SEQ ID NO: 4204 - DNA, 20 bp, synthetic construct
  source 1..20: mol_type = other DNA
ctgcagattcttgggttgtg

SEQ ID NO: 4205 - DNA, 20 bp, synthetic construct
  source 1..20: mol_type = other DNA
gctgaactcacatcacagct

SEQ ID NO: 4206 - DNA, 20 bp, synthetic construct
  source 1..20: mol_type = other DNA
gcaggagcgcagagggcagt

SEQ ID NO: 4207 - DNA, 20 bp, synthetic construct
  source 1..20: mol_type = other DNA
agaacctagagacttccttt

SEQ ID NO: 4208 - DNA, 20 bp, synthetic construct
  source 1..20: mol_type = other DNA
acaccaagattcacactgtg

SEQ ID NO: 4209 - DNA, 20 bp, synthetic construct
  source 1..20: mol_type = other DNA
tttgcacattgcattcccaa

SEQ ID NO: 4210 - DNA, 20 bp, synthetic construct
  source 1..20: mol_type = other DNA
actgtatggaaaatgagagc

SEQ ID NO: 4211 - DNA, 20 bp, synthetic construct
  source 1..20: mol_type = other DNA
tctccacaacttaagagcaa

SEQ ID NO: 4212 - DNA, 20 bp, synthetic construct
  source 1..20: mol_type = other DNA
gaggagggtaatgtcacgtg

SEQ ID NO: 4213 - DNA, 20 bp, synthetic construct
  source 1..20: mol_type = other DNA
ccctttttcactgaattacc

SEQ ID NO: 4214 - DNA, 20 bp, synthetic construct
  source 1..20: mol_type = other DNA
gttatctttaggtcctcgag

SEQ ID NO: 4215 - DNA, 20 bp, synthetic construct
  source 1..20: mol_type = other DNA
gggcaaagggttgaattggt

SEQ ID NO: 4216 - DNA, 20 bp, synthetic construct
  source 1..20: mol_type = other DNA
atcttcctgaacattcagtg

SEQ ID NO: 4217 - DNA, 20 bp, synthetic construct
  source 1..20: mol_type = other DNA
aggcactgagaagtaagacc

SEQ ID NO: 4218 - DNA, 20 bp, synthetic construct
  source 1..20: mol_type = other DNA
tttaagaagggtttaagcgg

SEQ ID NO: 4219 - DNA, 20 bp, synthetic construct
  source 1..20: mol_type = other DNA
tctaatccgttgaaagctac

SEQ ID NO: 4220 - DNA, 20 bp, synthetic construct
  source 1..20: mol_type = other DNA
gtcttccatatacagcacaa

SEQ ID NO: 4221 - DNA, 20 bp, synthetic construct
  source 1..20: mol_type = other DNA
cgcagcagtatcctagtaca

SEQ ID NO: 4222 - DNA, 20 bp, synthetic construct
  source 1..20: mol_type = other DNA
aagcatcctgtacataaagg

SEQ ID NO: 4223 - DNA, 20 bp, synthetic construct
  source 1..20: mol_type = other DNA
ggacttgatggtcactgctt

SEQ ID NO: 4224 - DNA, 20 bp, synthetic construct
  source 1..20: mol_type = other DNA
taagtatatccaaccgtccc

SEQ ID NO: 4225 - DNA, 20 bp, synthetic construct
  source 1..20: mol_type = other DNA
agcgctgccgaaatcccgga

SEQ ID NO: 4226 - DNA, 20 bp, synthetic construct
  source 1..20: mol_type = other DNA
tattttgcccgtcttgtagc

SEQ ID NO: 4227 - DNA, 20 bp, synthetic construct
  source 1..20: mol_type = other DNA
ggaggtagaatgtcactgat

SEQ ID NO: 4228 - DNA, 20 bp, synthetic construct
  source 1..20: mol_type = other DNA
ttaaaatagccatgaggacc

SEQ ID NO: 4229 - DNA, 20 bp, synthetic construct
  source 1..20: mol_type = other DNA
ttccttgctgactttgttcc

SEQ ID NO: 4230 - DNA, 20 bp, synthetic construct
  source 1..20: mol_type = other DNA
gataccttgtagatatcctg

SEQ ID NO: 4231 - DNA, 20 bp, synthetic construct
  source 1..20: mol_type = other DNA
gagccatctcctggaaagat

SEQ ID NO: 4232 - DNA, 20 bp, synthetic construct
  source 1..20: mol_type = other DNA
gacctctgagtattcggtgg

SEQ ID NO: 4233 - DNA, 20 bp, synthetic construct
  source 1..20: mol_type = other DNA
gtacttccaagggtactagg

SEQ ID NO: 4234 - DNA, 20 bp, synthetic construct
  source 1..20: mol_type = other DNA
gagtgctgcaaggccatcga

SEQ ID NO: 4235 - DNA, 20 bp, synthetic construct
  source 1..20: mol_type = other DNA
ctgcgggaaaccgttttcca

SEQ ID NO: 4236 - DNA, 20 bp, synthetic construct
  source 1..20: mol_type = other DNA
tggatgctgcaattactgtg

SEQ ID NO: 4237 - DNA, 20 bp, synthetic construct
  source 1..20: mol_type = other DNA
tgtaatgtctgagagcagtg

SEQ ID NO: 4238 - DNA, 20 bp, synthetic construct
  source 1..20: mol_type = other DNA
cctctattctccctctaaac

SEQ ID NO: 4239 - DNA, 20 bp, synthetic construct
  source 1..20: mol_type = other DNA
cactttgctccaattctgaa

SEQ ID NO: 4240 - DNA, 20 bp, synthetic construct
  source 1..20: mol_type = other DNA
aagaaaaggagggaactgaa

SEQ ID NO: 4241 - DNA, 20 bp, synthetic construct
  source 1..20: mol_type = other DNA
cattttccagggttaccaag

SEQ ID NO: 4242 - DNA, 20 bp, synthetic construct
  source 1..20: mol_type = other DNA
gggtttcggttctccactgt

SEQ ID NO: 4243 - DNA, 20 bp, synthetic construct
  source 1..20: mol_type = other DNA
ttgtccaagggtgacatttt

SEQ ID NO: 4244 - DNA, 20 bp, synthetic construct
  source 1..20: mol_type = other DNA
gtattctcctttctggacat

SEQ ID NO: 4245 - DNA, 20 bp, synthetic construct
  source 1..20: mol_type = other DNA
ggatgtgaggatgtacaccc

SEQ ID NO: 4246 - DNA, 20 bp, synthetic construct
  source 1..20: mol_type = other DNA
ccctgtagaagtcacaatta

SEQ ID NO: 4247 - DNA, 20 bp, synthetic construct
  source 1..20: mol_type = other DNA
acagtgaatcatcaaggcca

SEQ ID NO: 4248 - DNA, 20 bp, synthetic construct
  source 1..20: mol_type = other DNA
caagtgcctaaaagggactc

SEQ ID NO: 4249 - DNA, 20 bp, synthetic construct
  source 1..20: mol_type = other DNA
gcccatctggagcttagggt

SEQ ID NO: 4250 - DNA, 20 bp, synthetic construct
  source 1..20: mol_type = other DNA
ccagctgttacaaaaccagt

SEQ ID NO: 4251 - DNA, 20 bp, synthetic construct
  source 1..20: mol_type = other DNA
ggctgtagtgggttaacggt

SEQ ID NO: 4252 - DNA, 20 bp, synthetic construct
  source 1..20: mol_type = other DNA
ctgctcatttcaaacaggag

SEQ ID NO: 4253 - DNA, 20 bp, synthetic construct
  source 1..20: mol_type = other DNA
ccgggcccaagaactcaggg

SEQ ID NO: 4254 - DNA, 20 bp, synthetic construct
  source 1..20: mol_type = other DNA
tggctcttgttcacattctg

SEQ ID NO: 4255 - DNA, 20 bp, synthetic construct
  source 1..20: mol_type = other DNA
gtagatgcgagtttgtgcca

SEQ ID NO: 4256 - DNA, 20 bp, synthetic construct
  source 1..20: mol_type = other DNA
accacaggacagcgttgcca

SEQ ID NO: 4257 - DNA, 20 bp, synthetic construct
  source 1..20: mol_type = other DNA
tgtccgaatcaaaacttgtg

SEQ ID NO: 4258 - DNA, 20 bp, synthetic construct
  source 1..20: mol_type = other DNA
caagcactgacagttcagaa

SEQ ID NO: 4259 - DNA, 20 bp, synthetic construct
  source 1..20: mol_type = other DNA
tggttgcagtaaagggtgat

SEQ ID NO: 4260 - DNA, 20 bp, synthetic construct
  source 1..20: mol_type = other DNA
agagggattcattttccagg

SEQ ID NO: 4261 - DNA, 20 bp, synthetic construct
  source 1..20: mol_type = other DNA
ggaggaggagatccattccc

SEQ ID NO: 4262 - DNA, 20 bp, synthetic construct
  source 1..20: mol_type = other DNA
gctgttactgtcagccattg

SEQ ID NO: 4263 - DNA, 20 bp, synthetic construct
  source 1..20: mol_type = other DNA
tgacgcccaagaaaatggat

SEQ ID NO: 4264 - DNA, 20 bp, synthetic construct
  source 1..20: mol_type = other DNA
ctttgctctctatttgtagc

SEQ ID NO: 4265 - DNA, 20 bp, synthetic construct
  source 1..20: mol_type = other DNA
ccattgcccacacatcgcaa

SEQ ID NO: 4266 - DNA, 20 bp, synthetic construct
  source 1..20: mol_type = other DNA
acacgcaccagcgagacgcc

SEQ ID NO: 4267 - DNA, 20 bp, synthetic construct
  source 1..20: mol_type = other DNA
gccgaagcactgtcacccgg

SEQ ID NO: 4268 - DNA, 20 bp, synthetic construct
  source 1..20: mol_type = other DNA
gcttcctagaaggtcatacc

SEQ ID NO: 4269 - DNA, 20 bp, synthetic construct
  source 1..20: mol_type = other DNA
tggtgatccagggtaggatc

SEQ ID NO: 4270 - DNA, 20 bp, synthetic construct
  source 1..20: mol_type = other DNA
ttctttcaggacatcttctc

SEQ ID NO: 4271 - DNA, 20 bp, synthetic construct
  source 1..20: mol_type = other DNA
cacgtgatgttgcatttcgt

SEQ ID NO: 4272 - DNA, 20 bp, synthetic construct
  source 1..20: mol_type = other DNA
ctcgccgatctgcttctcga

SEQ ID NO: 4273 - DNA, 20 bp, synthetic construct
  source 1..20: mol_type = other DNA
gtgggaaccagtattaggag

SEQ ID NO: 4274 - DNA, 20 bp, synthetic construct
  source 1..20: mol_type = other DNA
aagcaggaggtggaaactaa

SEQ ID NO: 4275 - DNA, 20 bp, synthetic construct
  source 1..20: mol_type = other DNA
gccagcaaactcctggatat

SEQ ID NO: 4276 - DNA, 20 bp, synthetic construct
  source 1..20: mol_type = other DNA
tccgaagaaggaggcatcaa

SEQ ID NO: 4277 - DNA, 20 bp, synthetic construct
  source 1..20: mol_type = other DNA
tgctcgaaggatgtgtcccg

SEQ ID NO: 4278 - DNA, 20 bp, synthetic construct
  source 1..20: mol_type = other DNA
gaattggccatcatgatgca

SEQ ID NO: 4279 - DNA, 20 bp, synthetic construct
  source 1..20: mol_type = other DNA
cagtgccgtatggctgtgcc

SEQ ID NO: 4280 - DNA, 20 bp, synthetic construct
  source 1..20: mol_type = other DNA
cttcacctccaggtgtttac

SEQ ID NO: 4281 - DNA, 20 bp, synthetic construct
  source 1..20: mol_type = other DNA
ggattctgagcatagacact

SEQ ID NO: 4282 - DNA, 20 bp, synthetic construct
  source 1..20: mol_type = other DNA
cgcactcgatatccagtgag

SEQ ID NO: 4283 - DNA, 20 bp, synthetic construct
  source 1..20: mol_type = other DNA
acatccgggccacttgcaga

SEQ ID NO: 4284 - DNA, 20 bp, synthetic construct
  source 1..20: mol_type = other DNA
ggcacctggtacttgaggca

SEQ ID NO: 4285 - DNA, 20 bp, synthetic construct
  source 1..20: mol_type = other DNA
atatatccatcgcgtttagg

SEQ ID NO: 4286 - DNA, 20 bp, synthetic construct
  source 1..20: mol_type = other DNA
ccatcttcttcagtttttgg

SEQ ID NO: 4287 - DNA, 20 bp, synthetic construct
  source 1..20: mol_type = other DNA
cacacgacagacatttattg

SEQ ID NO: 4288 - DNA, 20 bp, synthetic construct
  source 1..20: mol_type = other DNA
tgttttgaacaatgacgacc

SEQ ID NO: 4289 - DNA, 20 bp, synthetic construct
  source 1..20: mol_type = other DNA
tgtttggcagttctgaagag

SEQ ID NO: 4290 - DNA, 20 bp, synthetic construct
  source 1..20: mol_type = other DNA
ggaaaacaccctcgcacaac

SEQ ID NO: 4291 - DNA, 20 bp, synthetic construct
  source 1..20: mol_type = other DNA
tttaaggtcaccttcgcgtg

SEQ ID NO: 4292 - DNA, 20 bp, synthetic construct
  source 1..20: mol_type = other DNA
tccactcagctaagaggtat

SEQ ID NO: 4293 - DNA, 20 bp, synthetic construct
  source 1..20: mol_type = other DNA
ataggagagaataccttggg

SEQ ID NO: 4294 - DNA, 20 bp, synthetic construct
  source 1..20: mol_type = other DNA
cccagatgaaatgtgttgat

SEQ ID NO: 4295 - DNA, 20 bp, synthetic construct
  source 1..20: mol_type = other DNA
agtgaccttattgccctttg

SEQ ID NO: 4296 - DNA, 20 bp, synthetic construct
  source 1..20: mol_type = other DNA
gtcttcataagggagacaaa

SEQ ID NO: 4297 - DNA, 20 bp, synthetic construct
  source 1..20: mol_type = other DNA
cagtatctggatgtccaata

SEQ ID NO: 4298 - DNA, 20 bp, synthetic construct
  source 1..20: mol_type = other DNA
ctgaggtcaaggattgtaat

SEQ ID NO: 4299 - DNA, 20 bp, synthetic construct
  source 1..20: mol_type = other DNA
tatggccattttcttcttgg

SEQ ID NO: 4300 - DNA, 20 bp, synthetic construct
  source 1..20: mol_type = other DNA
cgttcgcctttctttcccgg

SEQ ID NO: 4301 - DNA, 20 bp, synthetic construct
  source 1..20: mol_type = other DNA
cacgtctatcaagacgagcg

SEQ ID NO: 4302 - DNA, 20 bp, synthetic construct
  source 1..20: mol_type = other DNA
gccatggtgatgcatcccag

SEQ ID NO: 4303 - DNA, 20 bp, synthetic construct
  source 1..20: mol_type = other DNA
gcagtctccatcacgaaatg

SEQ ID NO: 4304 - DNA, 20 bp, synthetic construct
  source 1..20: mol_type = other DNA
tgcctaagaaaagagttcca

SEQ ID NO: 4305 - DNA, 20 bp, synthetic construct
  source 1..20: mol_type = other DNA
catcacttggatgagttcat

SEQ ID NO: 4306 - DNA, 20 bp, synthetic construct
  source 1..20: mol_type = other DNA
gtgcaggtgacggaggtccc

SEQ ID NO: 4307 - DNA, 20 bp, synthetic construct
  source 1..20: mol_type = other DNA
gtgggttttcacagcttcgc

SEQ ID NO: 4308 - DNA, 20 bp, synthetic construct
  source 1..20: mol_type = other DNA
cagggacacgttgtacaggg

SEQ ID NO: 4309 - DNA, 20 bp, synthetic construct
  source 1..20: mol_type = other DNA
gggtctggctacagttggag

SEQ ID NO: 4310 - DNA, 20 bp, synthetic construct
  source 1..20: mol_type = other DNA
gtggtggaaaaattctgctt

SEQ ID NO: 4311 - DNA, 20 bp, synthetic construct
  source 1..20: mol_type = other DNA
gccagacttagactggctta

SEQ ID NO: 4312 - DNA, 20 bp, synthetic construct
  source 1..20: mol_type = other DNA
aaaacagctcaacagctaga

SEQ ID NO: 4313 - DNA, 20 bp, synthetic construct
  source 1..20: mol_type = other DNA
gtttcttccaatcaactggg

SEQ ID NO: 4314 - DNA, 20 bp, synthetic construct
  source 1..20: mol_type = other DNA
tggacaaactgccttaagaa

SEQ ID NO: 4315 - DNA, 20 bp, synthetic construct
  source 1..20: mol_type = other DNA
agcttgtccatggccacaac

SEQ ID NO: 4316 - DNA, 20 bp, synthetic construct
  source 1..20: mol_type = other DNA
gtggccgtggtttctgtcag

SEQ ID NO: 4317 - DNA, 20 bp, synthetic construct
  source 1..20: mol_type = other DNA
acagagcatatagagtgacc

SEQ ID NO: 4318 - DNA, 20 bp, synthetic construct
  source 1..20: mol_type = other DNA
ggacctctgtgtagagccct

SEQ ID NO: 4319 - DNA, 20 bp, synthetic construct
  source 1..20: mol_type = other DNA
gagatttcccagcttatgtt

SEQ ID NO: 4320 - DNA, 20 bp, synthetic construct
  source 1..20: mol_type = other DNA
ccttgcagaggcttgacccg

SEQ ID NO: 4321 - DNA, 20 bp, synthetic construct
  source 1..20: mol_type = other DNA
ggtatacctcaaactccaaa

SEQ ID NO: 4322 - DNA, 20 bp, synthetic construct
  source 1..20: mol_type = other DNA
cagggctgagatgccgtcga

SEQ ID NO: 4323 - DNA, 20 bp, synthetic construct
  source 1..20: mol_type = other DNA
ctccttcccgatagacgaca

SEQ ID NO: 4324 - DNA, 20 bp, synthetic construct
  source 1..20: mol_type = other DNA
taccagtcctttaagccaac

SEQ ID NO: 4325 - DNA, 20 bp, synthetic construct
  source 1..20: mol_type = other DNA
acacctggaagttgtacaga

SEQ ID NO: 4326 - DNA, 20 bp, synthetic construct
  source 1..20: mol_type = other DNA
ctcgggcgcacgtcttgcct

SEQ ID NO: 4327 - DNA, 20 bp, synthetic construct
  source 1..20: mol_type = other DNA
aagctcagccagaaagtcgg

SEQ ID NO: 4328 - DNA, 20 bp, synthetic construct
  source 1..20: mol_type = other DNA
gctgcatgacccgactggta

SEQ ID NO: 4329 - DNA, 20 bp, synthetic construct
  source 1..20: mol_type = other DNA
cacgctgtctccaaacccag

SEQ ID NO: 4330 - DNA, 20 bp, synthetic construct
  source 1..20: mol_type = other DNA
gtttcagcgaggcttgtggg

SEQ ID NO: 4331 - DNA, 20 bp, synthetic construct
  source 1..20: mol_type = other DNA
tcaccgcgaagatgggctgg

SEQ ID NO: 4332 - DNA, 20 bp, synthetic construct
  source 1..20: mol_type = other DNA
atcttcggaagaacggatga

SEQ ID NO: 4333 - DNA, 20 bp, synthetic construct
  source 1..20: mol_type = other DNA
ggcagcattgacgtcagaat

SEQ ID NO: 4334 - DNA, 20 bp, synthetic construct
  source 1..20: mol_type = other DNA
atgccagctacgattacgaa

SEQ ID NO: 4335 - DNA, 20 bp, synthetic construct
  source 1..20: mol_type = other DNA
ccaatccaaaacagaattgc

SEQ ID NO: 4336 - DNA, 20 bp, synthetic construct
  source 1..20: mol_type = other DNA
catagtcaagagtcaggata

SEQ ID NO: 4337 - DNA, 20 bp, synthetic construct
  source 1..20: mol_type = other DNA
tttcagaaagaacagcgttg

SEQ ID NO: 4338 - DNA, 20 bp, synthetic construct
  source 1..20: mol_type = other DNA
cacttcccttggtatttgag

SEQ ID NO: 4339 - DNA, 20 bp, synthetic construct
  source 1..20: mol_type = other DNA
actaatagcagtggaaagga

SEQ ID NO: 4340 - DNA, 20 bp, synthetic construct
  source 1..20: mol_type = other DNA
ggattatgtctcttgtttgg

SEQ ID NO: 4341 - DNA, 20 bp, synthetic construct
  source 1..20: mol_type = other DNA
gaaggagcagttcaaaatga

SEQ ID NO: 4342 - DNA, 20 bp, synthetic construct
  source 1..20: mol_type = other DNA
gtggcggagagcagacagag

SEQ ID NO: 4343 - DNA, 20 bp, synthetic construct
  source 1..20: mol_type = other DNA
tgcttccctggaaagatggg

SEQ ID NO: 4344 - DNA, 20 bp, synthetic construct
  source 1..20: mol_type = other DNA
catggaacgtggttactgaa

SEQ ID NO: 4345 - DNA, 20 bp, synthetic construct
  source 1..20: mol_type = other DNA
cagtaggagaacagcacccg

SEQ ID NO: 4346 - DNA, 20 bp, synthetic construct
  source 1..20: mol_type = other DNA
taagtggctcaacccgatat

SEQ ID NO: 4347 - DNA, 20 bp, synthetic construct
  source 1..20: mol_type = other DNA
ctgaagagtggttttggacc

SEQ ID NO: 4348 - DNA, 20 bp, synthetic construct
  source 1..20: mol_type = other DNA
attgccaaagggataatcgg

SEQ ID NO: 4349 - DNA, 20 bp, synthetic construct
  source 1..20: mol_type = other DNA
gtccttgaagttgatctccc

SEQ ID NO: 4350 - DNA, 20 bp, synthetic construct
  source 1..20: mol_type = other DNA
ccgccagccttacggcgtac

SEQ ID NO: 4351 - DNA, 20 bp, synthetic construct
  source 1..20: mol_type = other DNA
tattgccctgccatgcggga

SEQ ID NO: 4352 - DNA, 20 bp, synthetic construct
  source 1..20: mol_type = other DNA
tgcatcgtccgggatgctct

SEQ ID NO: 4353 - DNA, 20 bp, synthetic construct
  source 1..20: mol_type = other DNA
cccacagcctcaaaccagaa

SEQ ID NO: 4354 - DNA, 20 bp, synthetic construct
  source 1..20: mol_type = other DNA
gtctcaatagcctcttctag

SEQ ID NO: 4355 - DNA, 20 bp, synthetic construct
  source 1..20: mol_type = other DNA
aggatttccatagtgccaat

SEQ ID NO: 4356 - DNA, 20 bp, synthetic construct
  source 1..20: mol_type = other DNA
ttagcacgaagctctccgat

SEQ ID NO: 4357 - DNA, 20 bp, synthetic construct
  source 1..20: mol_type = other DNA
ccggactcaggactccgaac

SEQ ID NO: 4358 - DNA, 20 bp, synthetic construct
  source 1..20: mol_type = other DNA
agtaaccgggttcctgaacg

SEQ ID NO: 4359 - DNA, 20 bp, synthetic construct
  source 1..20: mol_type = other DNA
aagggcttgatatcaaagga

SEQ ID NO: 4360 - DNA, 20 bp, synthetic construct
  source 1..20: mol_type = other DNA
cgtcttcttgatcacctgca

SEQ ID NO: 4361 - DNA, 20 bp, synthetic construct
  source 1..20: mol_type = other DNA
gaagtagatgttcatcccgt

SEQ ID NO: 4362 - DNA, 20 bp, synthetic construct
  source 1..20: mol_type = other DNA
gaaccttgaggctacagaga

SEQ ID NO: 4363 - DNA, 20 bp, synthetic construct
  source 1..20: mol_type = other DNA
acgtccagcccgaccttcca

SEQ ID NO: 4364 - DNA, 20 bp, synthetic construct
  source 1..20: mol_type = other DNA
gatgctgccgtggatgccta

SEQ ID NO: 4365 - DNA, 20 bp, synthetic construct
  source 1..20: mol_type = other DNA
agctggccctcgcttatgat

SEQ ID NO: 4366 - DNA, 20 bp, synthetic construct
  source 1..20: mol_type = other DNA
ttgatatcatctagtccgga

SEQ ID NO: 4367 - DNA, 20 bp, synthetic construct
  source 1..20: mol_type = other DNA
cccagcttcacagagtattg

SEQ ID NO: 4368 - DNA, 20 bp, synthetic construct
  source 1..20: mol_type = other DNA
ctgaagctgaagtttcccaa

SEQ ID NO: 4369 - DNA, 20 bp, synthetic construct
  source 1..20: mol_type = other DNA
ggtttcttcaatcccagtta

SEQ ID NO: 4370 - DNA, 20 bp, synthetic construct
  source 1..20: mol_type = other DNA
ggccgtgttgacgataccgg

SEQ ID NO: 4371 - DNA, 20 bp, synthetic construct
  source 1..20: mol_type = other DNA
ctccaaagaaaagcgactat

SEQ ID NO: 4372 - DNA, 20 bp, synthetic construct
  source 1..20: mol_type = other DNA
atgaaaacggatggtggcaa

SEQ ID NO: 4373 - DNA, 20 bp, synthetic construct
  source 1..20: mol_type = other DNA
aatgcaggcaatctgttgcc

SEQ ID NO: 4374 - DNA, 20 bp, synthetic construct
  source 1..20: mol_type = other DNA
gaatcgttggttgacacgtt

SEQ ID NO: 4375 - DNA, 20 bp, synthetic construct
  source 1..20: mol_type = other DNA
gagtaggtttttctctttgg

SEQ ID NO: 4376 - DNA, 20 bp, synthetic construct
  source 1..20: mol_type = other DNA
cctcgttggcaaagcttcga

SEQ ID NO: 4377 - DNA, 20 bp, synthetic construct
  source 1..20: mol_type = other DNA
cctccaagtgtaagggagtc

SEQ ID NO: 4378 - DNA, 20 bp, synthetic construct
  source 1..20: mol_type = other DNA
cttggaccacaacaggtggt

SEQ ID NO: 4379 - DNA, 20 bp, synthetic construct
  source 1..20: mol_type = other DNA
ccttcatccgtttcccaaat

SEQ ID NO: 4380 - DNA, 20 bp, synthetic construct
  source 1..20: mol_type = other DNA
ggacgacgtcttcccgacgc

SEQ ID NO: 4381 - DNA, 20 bp, synthetic construct
  source 1..20: mol_type = other DNA
aggcgtgtttacatgcaggc

SEQ ID NO: 4382 - DNA, 20 bp, synthetic construct
  source 1..20: mol_type = other DNA
acacgggttcaggtaccgct

SEQ ID NO: 4383 - DNA, 20 bp, synthetic construct
  source 1..20: mol_type = other DNA
tgacacagagatccgcagtc

SEQ ID NO: 4384 - DNA, 20 bp, synthetic construct
  source 1..20: mol_type = other DNA
tcccaggccacttcatcaca

SEQ ID NO: 4385 - DNA, 20 bp, synthetic construct
  source 1..20: mol_type = other DNA
ctccaagaatttcctacaag

SEQ ID NO: 4386 - DNA, 20 bp, synthetic construct
  source 1..20: mol_type = other DNA
gcagccggagggaactctgg

SEQ ID NO: 4387 - DNA, 20 bp, synthetic construct
  source 1..20: mol_type = other DNA
gtgatcctgttgttggacag

SEQ ID NO: 4388 - DNA, 20 bp, synthetic construct
  source 1..20: mol_type = other DNA
ttgtccatgataagaccagg

SEQ ID NO: 4389 - DNA, 20 bp, synthetic construct
  source 1..20: mol_type = other DNA
atctggaaggaagttttcct

SEQ ID NO: 4390 - DNA, 20 bp, synthetic construct
  source 1..20: mol_type = other DNA
agaggaggagtattagaaga

SEQ ID NO: 4391 - DNA, 20 bp, synthetic construct
  source 1..20: mol_type = other DNA
agtcctgctcttttccaggt

SEQ ID NO: 4392 - DNA, 20 bp, synthetic construct
  source 1..20: mol_type = other DNA
cctgtcctcacagattgcgt

SEQ ID NO: 4393 - DNA, 20 bp, synthetic construct
  source 1..20: mol_type = other DNA
gaggaccagcaacagagtgg

SEQ ID NO: 4394 - DNA, 20 bp, synthetic construct
  source 1..20: mol_type = other DNA
tcagcagcacttattttcgt

SEQ ID NO: 4395 - DNA, 20 bp, synthetic construct
  source 1..20: mol_type = other DNA
cagctgaatagcaggaatta

SEQ ID NO: 4396 - DNA, 20 bp, synthetic construct
  source 1..20: mol_type = other DNA
aataagtgaccacagggaat

SEQ ID NO: 4397 - DNA, 20 bp, synthetic construct
  source 1..20: mol_type = other DNA
cggccctggaaaccgaaggc

SEQ ID NO: 4398 - DNA, 20 bp, synthetic construct
  source 1..20: mol_type = other DNA
ctccacgtcccggatcatgc

SEQ ID NO: 4399 - DNA, 20 bp, synthetic construct
  source 1..20: mol_type = other DNA
tgatcccaaagtagacctgc

SEQ ID NO: 4400 - DNA, 20 bp, synthetic construct
  source 1..20: mol_type = other DNA
cctgtctccgcttttttctt

SEQ ID NO: 4401 - DNA, 20 bp, synthetic construct
  source 1..20: mol_type = other DNA
gtttgcgtactctgcctttg

SEQ ID NO: 4402 - DNA, 20 bp, synthetic construct
  source 1..20: mol_type = other DNA
tggatggcagtagctgcgct

SEQ ID NO: 4403 - DNA, 20 bp, synthetic construct
  source 1..20: mol_type = other DNA
cagcgtggtttctgtatcga

SEQ ID NO: 4404 - DNA, 20 bp, synthetic construct
  source 1..20: mol_type = other DNA
ctgcatgattctgagcaggt

SEQ ID NO: 4405 - DNA, 20 bp, synthetic construct
  source 1..20: mol_type = other DNA
catggtattggtggaaaaga

SEQ ID NO: 4406 - DNA, 20 bp, synthetic construct
  source 1..20: mol_type = other DNA
gtaggcggatgggcgtctcc

SEQ ID NO: 4407 - DNA, 20 bp, synthetic construct
  source 1..20: mol_type = other DNA
tgtaaccgtgggtgtcaccg

SEQ ID NO: 4408 - DNA, 20 bp, synthetic construct
  source 1..20: mol_type = other DNA
gcaccagtataacccagagt

SEQ ID NO: 4409 - DNA, 20 bp, synthetic construct
  source 1..20: mol_type = other DNA
acttgaagctccaactcagg

SEQ ID NO: 4410 - DNA, 20 bp, synthetic construct
  source 1..20: mol_type = other DNA
ttctacgtcaccctcatgat

SEQ ID NO: 4411 - DNA, 20 bp, synthetic construct
  source 1..20: mol_type = other DNA
ggaccattttctactcctag

SEQ ID NO: 4412 - DNA, 20 bp, synthetic construct
  source 1..20: mol_type = other DNA
tttttctcgccggtactgac

SEQ ID NO: 4413 - DNA, 20 bp, synthetic construct
  source 1..20: mol_type = other DNA
cccgcatgttcaagaagacg

SEQ ID NO: 4414 - DNA, 20 bp, synthetic construct
  source 1..20: mol_type = other DNA
tgggattcgtgtagtgcttc

SEQ ID NO: 4415 - DNA, 20 bp, synthetic construct
  source 1..20: mol_type = other DNA
gggctttgttggagaccttg

SEQ ID NO: 4416 - DNA, 20 bp, synthetic construct
  source 1..20: mol_type = other DNA
aggctcttctgtgtgtagtg

SEQ ID NO: 4417 - DNA, 20 bp, synthetic construct
  source 1..20: mol_type = other DNA
ggaatgtgtactagtcccat

SEQ ID NO: 4418 - DNA, 20 bp, synthetic construct
  source 1..20: mol_type = other DNA
acagtcctttgcatgcagat

SEQ ID NO: 4419 - DNA, 20 bp, synthetic construct
  source 1..20: mol_type = other DNA
agctctgcagcccataagca

SEQ ID NO: 4420 - DNA, 20 bp, synthetic construct
  source 1..20: mol_type = other DNA
gcaggtagcagtgttcatac

SEQ ID NO: 4421 - DNA, 20 bp, synthetic construct
  source 1..20: mol_type = other DNA
gagtggtccactgtcttgag

SEQ ID NO: 4422 - DNA, 20 bp, synthetic construct
  source 1..20: mol_type = other DNA
gcaggattccggctcacggc

SEQ ID NO: 4423 - DNA, 20 bp, synthetic construct
  source 1..20: mol_type = other DNA
ctctagtcgctgtggtgttc

SEQ ID NO: 4424 - DNA, 20 bp, synthetic construct
  source 1..20: mol_type = other DNA
gtggaaagcagaagtctaag

SEQ ID NO: 4425 - DNA, 20 bp, synthetic construct
  source 1..20: mol_type = other DNA
tgtaggctcagaatatgtct

SEQ ID NO: 4426 - DNA, 20 bp, synthetic construct
  source 1..20: mol_type = other DNA
gtgtggtccatccttggaag

SEQ ID NO: 4427 - DNA, 20 bp, synthetic construct
  source 1..20: mol_type = other DNA
ccagggcctatgcaaagaca

SEQ ID NO: 4428 - DNA, 20 bp, synthetic construct
  source 1..20: mol_type = other DNA
gcatcaaatctagaaggttc

SEQ ID NO: 4429 - DNA, 20 bp, synthetic construct
  source 1..20: mol_type = other DNA
atggattcctttgcctcttg

SEQ ID NO: 4430 - DNA, 20 bp, synthetic construct
  source 1..20: mol_type = other DNA
caaggcaaatgtgtgaaagg

SEQ ID NO: 4431 - DNA, 20 bp, synthetic construct
  source 1..20: mol_type = other DNA
tgggcaccaatcatgcttcc

SEQ ID NO: 4432 - DNA, 20 bp, synthetic construct
  source 1..20: mol_type = other DNA
gttaaccattgagtgttcac

SEQ ID NO: 4433 - DNA, 20 bp, synthetic construct
  source 1..20: mol_type = other DNA
gaaggcccggtcgaagttca

SEQ ID NO: 4434 - DNA, 20 bp, synthetic construct
  source 1..20: mol_type = other DNA
ctcgttttctccatagtcat

SEQ ID NO: 4435 - DNA, 20 bp, synthetic construct
  source 1..20: mol_type = other DNA
ctgtaggtgctgaaatcaac

SEQ ID NO: 4436 - DNA, 20 bp, synthetic construct
  source 1..20: mol_type = other DNA
ccacgagacatacagcaact

SEQ ID NO: 4437 - DNA, 20 bp, synthetic construct
  source 1..20: mol_type = other DNA
ctcgaggtccatttccagcg

SEQ ID NO: 4438 - DNA, 20 bp, synthetic construct
  source 1..20: mol_type = other DNA
tgtttcttacacttccctgc

SEQ ID NO: 4439 - DNA, 20 bp, synthetic construct
  source 1..20: mol_type = other DNA
agtaggctcttgcacatgac

SEQ ID NO: 4440 - DNA, 20 bp, synthetic construct
  source 1..20: mol_type = other DNA
taggagtcacatgtcatccc

SEQ ID NO: 4441 - DNA, 20 bp, synthetic construct
  source 1..20: mol_type = other DNA
gtctgcgtacttccagacca

SEQ ID NO: 4442 - DNA, 20 bp, synthetic construct
  source 1..20: mol_type = other DNA
gtaaatttctcatgggcagc

SEQ ID NO: 4443 - DNA, 20 bp, synthetic construct
  source 1..20: mol_type = other DNA
gataccgaaacgtgaccggt

SEQ ID NO: 4444 - DNA, 20 bp, synthetic construct
  source 1..20: mol_type = other DNA
tttatgctctactgacggcg

SEQ ID NO: 4445 - DNA, 20 bp, synthetic construct
  source 1..20: mol_type = other DNA
cactagcatgatgtaaatcg

SEQ ID NO: 4446 - DNA, 20 bp, synthetic construct
  source 1..20: mol_type = other DNA
aggagggtcaaactataaca

SEQ ID NO: 4447 - DNA, 20 bp, synthetic construct
  source 1..20: mol_type = other DNA
tggtctcgcccgaaagccat

SEQ ID NO: 4448 - DNA, 20 bp, synthetic construct
  source 1..20: mol_type = other DNA
agcaaacgtctggtgctcta

SEQ ID NO: 4449 - DNA, 20 bp, synthetic construct
  source 1..20: mol_type = other DNA
tacgtacgcagcggcgttaa

SEQ ID NO: 4450 - DNA, 20 bp, synthetic construct
  source 1..20: mol_type = other DNA
ttacaactgcgagaattgac

SEQ ID NO: 4451 - DNA, 20 bp, synthetic construct
  source 1..20: mol_type = other DNA
acataaagggagactgtaag

SEQ ID NO: 4452 - DNA, 20 bp, synthetic construct
  source 1..20: mol_type = other DNA
taatcgagagcacttgtcag

SEQ ID NO: 4453 - DNA, 20 bp, synthetic construct
  source 1..20: mol_type = other DNA
gggacatgaccttttaaggg

SEQ ID NO: 4454 - DNA, 20 bp, synthetic construct
  source 1..20: mol_type = other DNA
tccaaatatgagactgtgga

SEQ ID NO: 4455 - DNA, 20 bp, synthetic construct
  source 1..20: mol_type = other DNA
gtcccagcggtagttgagtc

SEQ ID NO: 4456 - DNA, 20 bp, synthetic construct
  source 1..20: mol_type = other DNA
aggaggttgccctcgtactc

SEQ ID NO: 4457 - DNA, 20 bp, synthetic construct
  source 1..20: mol_type = other DNA
agacatccagactgtcgcat

SEQ ID NO: 4458 - DNA, 20 bp, synthetic construct
  source 1..20: mol_type = other DNA
tgagttctccatcttcagtg

SEQ ID NO: 4459 - DNA, 20 bp, synthetic construct
  source 1..20: mol_type = other DNA
catatccaagtgtccagagg

SEQ ID NO: 4460 - DNA, 20 bp, synthetic construct
  source 1..20: mol_type = other DNA
acacacaggtctaggtcgtg

SEQ ID NO: 4461 - DNA, 20 bp, synthetic construct
  source 1..20: mol_type = other DNA
ctttggaatcaccactgacc

SEQ ID NO: 4462 - DNA, 20 bp, synthetic construct
  source 1..20: mol_type = other DNA
cccagtacttgttgaagtcg

SEQ ID NO: 4463 - DNA, 20 bp, synthetic construct
  source 1..20: mol_type = other DNA
ccaaagaggaggaattcctt

SEQ ID NO: 4464 - DNA, 20 bp, synthetic construct
  source 1..20: mol_type = other DNA
ttccttgagcacaatccagg

SEQ ID NO: 4465 - DNA, 20 bp, synthetic construct
  source 1..20: mol_type = other DNA
tgaaggaagctttgatttgc

SEQ ID NO: 4466 - DNA, 20 bp, synthetic construct
  source 1..20: mol_type = other DNA
aaaagtgctgtacttcttgg

SEQ ID NO: 4467 - DNA, 20 bp, synthetic construct
  source 1..20: mol_type = other DNA
aattcaacagggatggactg

SEQ ID NO: 4468 - DNA, 20 bp, synthetic construct
  source 1..20: mol_type = other DNA
attgggaacagccaaatcag

SEQ ID NO: 4469 - DNA, 20 bp, synthetic construct
  source 1..20: mol_type = other DNA
agggaagggaaacctcttga

SEQ ID NO: 4470 - DNA, 20 bp, synthetic construct
  source 1..20: mol_type = other DNA
tttgagttcgagtccgcttg

SEQ ID NO: 4471 - DNA, 20 bp, synthetic construct
  source 1..20: mol_type = other DNA
actttcttctcagccgcatt

SEQ ID NO: 4472 - DNA, 20 bp, synthetic construct
  source 1..20: mol_type = other DNA
agaacagatctgctcagtgt

SEQ ID NO: 4473 - DNA, 20 bp, synthetic construct
  source 1..20: mol_type = other DNA
ttcacagtggaacacgatga

SEQ ID NO: 4474 - DNA, 20 bp, synthetic construct
  source 1..20: mol_type = other DNA
gatcttggtgtttccctgac

SEQ ID NO: 4475 - DNA, 20 bp, synthetic construct
  source 1..20: mol_type = other DNA
acacttgttgttccagacaa

SEQ ID NO: 4476 - DNA, 20 bp, synthetic construct
  source 1..20: mol_type = other DNA
gttgtaccaagcactgattt

SEQ ID NO: 4477 - DNA, 20 bp, synthetic construct
  source 1..20: mol_type = other DNA
gtggtgggattgaagatcgg

SEQ ID NO: 4478 - DNA, 20 bp, synthetic construct
  source 1..20: mol_type = other DNA
cctcaactgcattcccgttg

SEQ ID NO: 4479 - DNA, 20 bp, synthetic construct
  source 1..20: mol_type = other DNA
gctttcctccggatggtgat

SEQ ID NO: 4480 - DNA, 20 bp, synthetic construct
  source 1..20: mol_type = other DNA
tcggcggcctccaggatcaa

SEQ ID NO: 4481 - DNA, 20 bp, synthetic construct
  source 1..20: mol_type = other DNA
gaggacgggagactctggtt

SEQ ID NO: 4482 - DNA, 20 bp, synthetic construct
  source 1..20: mol_type = other DNA
tgaaagaggtacctgagtat

SEQ ID NO: 4483 - DNA, 20 bp, synthetic construct
  source 1..20: mol_type = other DNA
gtggcaggagaggttgaggt

SEQ ID NO: 4484 - DNA, 20 bp, synthetic construct
  source 1..20: mol_type = other DNA
gactttgtttgtagtacctg

SEQ ID NO: 4485 - DNA, 20 bp, synthetic construct
  source 1..20: mol_type = other DNA
gatgtaagctgtatgtaacc

SEQ ID NO: 4486 - DNA, 20 bp, synthetic construct
  source 1..20: mol_type = other DNA
ttctccataacatccttgga

SEQ ID NO: 4487 - DNA, 20 bp, synthetic construct
  source 1..20: mol_type = other DNA
agcgtgtctgtattcgtgcg

SEQ ID NO: 4488 - DNA, 20 bp, synthetic construct
  source 1..20: mol_type = other DNA
tttggcttcactatccttcc

SEQ ID NO: 4489 - DNA, 20 bp, synthetic construct
  source 1..20: mol_type = other DNA
tggaggtaggccattttggt

SEQ ID NO: 4490 - DNA, 20 bp, synthetic construct
  source 1..20: mol_type = other DNA
aggtctcaagttttggtctc

SEQ ID NO: 4491 - DNA, 20 bp, synthetic construct
  source 1..20: mol_type = other DNA
aggtgtaggatcaatgtcat

SEQ ID NO: 4492 - DNA, 20 bp, synthetic construct
  source 1..20: mol_type = other DNA
ccattgttcctctctagtta

SEQ ID NO: 4493 - DNA, 20 bp, synthetic construct
  source 1..20: mol_type = other DNA
gaaagtctagcactttgttc

SEQ ID NO: 4494 - DNA, 20 bp, synthetic construct
  source 1..20: mol_type = other DNA
gctcagattcagcaaggagt

SEQ ID NO: 4495 - DNA, 20 bp, synthetic construct
  source 1..20: mol_type = other DNA
ccctgcgtctgtcccttaga

SEQ ID NO: 4496 - DNA, 20 bp, synthetic construct
  source 1..20: mol_type = other DNA
tgagtacccatgggaggtat

SEQ ID NO: 4497 - DNA, 20 bp, synthetic construct
  source 1..20: mol_type = other DNA
ccttggacatgatgcacctt

SEQ ID NO: 4498 - DNA, 20 bp, synthetic construct
  source 1..20: mol_type = other DNA
ggtaggactttagcagctcg

SEQ ID NO: 4499 - DNA, 20 bp, synthetic construct
  source 1..20: mol_type = other DNA
gagagatccgcatcttcgca

SEQ ID NO: 4500 - DNA, 20 bp, synthetic construct
  source 1..20: mol_type = other DNA
acgtgagccgaggcgtttgt

SEQ ID NO: 4501 - DNA, 20 bp, synthetic construct
  source 1..20: mol_type = other DNA
ttaaagtttgcagcactacc

SEQ ID NO: 4502 - DNA, 20 bp, synthetic construct
  source 1..20: mol_type = other DNA
tcttctgctttaacacggaa

SEQ ID NO: 4503 - DNA, 20 bp, synthetic construct
  source 1..20: mol_type = other DNA
gtcaccagaaccaagagtgc

SEQ ID NO: 4504 - DNA, 20 bp, synthetic construct
  source 1..20: mol_type = other DNA
cttagcgatctgttcaccct

SEQ ID NO: 4505 - DNA, 20 bp, synthetic construct
  source 1..20: mol_type = other DNA
tgaagacgtccatgttatcc

SEQ ID NO: 4506 - DNA, 20 bp, synthetic construct
  source 1..20: mol_type = other DNA
tgtggtccacagtagttttt

SEQ ID NO: 4507 - DNA, 20 bp, synthetic construct
  source 1..20: mol_type = other DNA
acgttgacttggatctgtca

SEQ ID NO: 4508 - DNA, 20 bp, synthetic construct
  source 1..20: mol_type = other DNA
ggtggacgacgacgagaagc

SEQ ID NO: 4509 - DNA, 20 bp, synthetic construct
  source 1..20: mol_type = other DNA
cgtttgctgatgaactcaga

SEQ ID NO: 4510 - DNA, 20 bp, synthetic construct
  source 1..20: mol_type = other DNA
actgaatcttgcactgcttt

SEQ ID NO: 4511 - DNA, 20 bp, synthetic construct
  source 1..20: mol_type = other DNA
agaacctctgaagttggcaa

SEQ ID NO: 4512 - DNA, 20 bp, synthetic construct
  source 1..20: mol_type = other DNA
agttctgtcttcatagtggc

SEQ ID NO: 4513 - DNA, 20 bp, synthetic construct
  source 1..20: mol_type = other DNA
agcagctcaatgatccaact

SEQ ID NO: 4514 - DNA, 20 bp, synthetic construct
  source 1..20: mol_type = other DNA
ttgcatgaagtcttgtaagc

SEQ ID NO: 4515 - DNA, 20 bp, synthetic construct
  source 1..20: mol_type = other DNA
tgacagtattttgtgcacca

SEQ ID NO: 4516 - DNA, 20 bp, synthetic construct
  source 1..20: mol_type = other DNA
gaccttcaaagatgtcttcg

SEQ ID NO: 4517 - DNA, 20 bp, synthetic construct
  source 1..20: mol_type = other DNA
gggcacagggccaagctttt

SEQ ID NO: 4518 - DNA, 20 bp, synthetic construct
  source 1..20: mol_type = other DNA
gtggtgatattcacggccgc

SEQ ID NO: 4519 - DNA, 20 bp, synthetic construct
  source 1..20: mol_type = other DNA
cccaccgtgaattcgttttg

SEQ ID NO: 4520 - DNA, 20 bp, synthetic construct
  source 1..20: mol_type = other DNA
ctgccagttctcttgaataa

SEQ ID NO: 4521 - DNA, 20 bp, synthetic construct
  source 1..20: mol_type = other DNA
accttaatttaggacacacc

SEQ ID NO: 4522 - DNA, 20 bp, synthetic construct
  source 1..20: mol_type = other DNA
aacgtgcatgatgctgaacc

SEQ ID NO: 4523 - DNA, 20 bp, synthetic construct
  source 1..20: mol_type = other DNA
tgttcacagaacatactagg

SEQ ID NO: 4524 - DNA, 20 bp, synthetic construct
  source 1..20: mol_type = other DNA
cagaaagagaagccttttgg

SEQ ID NO: 4525 - DNA, 20 bp, synthetic construct
  source 1..20: mol_type = other DNA
ctgtgtcattcaactcaact

SEQ ID NO: 4526 - DNA, 20 bp, synthetic construct
  source 1..20: mol_type = other DNA
ctcccacatgttctaaccag

SEQ ID NO: 4527 - DNA, 20 bp, synthetic construct
  source 1..20: mol_type = other DNA
ctcagtgttacatccggtga

SEQ ID NO: 4528 - DNA, 20 bp, synthetic construct
  source 1..20: mol_type = other DNA
agctccagacgtctgactgg

SEQ ID NO: 4529 - DNA, 20 bp, synthetic construct
  source 1..20: mol_type = other DNA
cgcggaccacgtagtagtct

SEQ ID NO: 4530 - DNA, 20 bp, synthetic construct
  source 1..20: mol_type = other DNA
ccgcaggcactgaaagcccg

SEQ ID NO: 4531 - DNA, 20 bp, synthetic construct
  source 1..20: mol_type = other DNA
ggtgcgtctcagctccgtta

SEQ ID NO: 4532 - DNA, 20 bp, synthetic construct
  source 1..20: mol_type = other DNA
cgactggaggttggctaact

SEQ ID NO: 4533 - DNA, 20 bp, synthetic construct
  source 1..20: mol_type = other DNA
caaaggcatagtctggtatg

SEQ ID NO: 4534 - DNA, 20 bp, synthetic construct
  source 1..20: mol_type = other DNA
aacttctaaaagcctggacg

SEQ ID NO: 4535 - DNA, 20 bp, synthetic construct
  source 1..20: mol_type = other DNA
ttttgccatcattacaccag

SEQ ID NO: 4536 - DNA, 20 bp, synthetic construct
  source 1..20: mol_type = other DNA
gtggcctgtactaaattgac

SEQ ID NO: 4537 - DNA, 20 bp, synthetic construct
  source 1..20: mol_type = other DNA
atggatttctgaacctgact

SEQ ID NO: 4538 - DNA, 20 bp, synthetic construct
  source 1..20: mol_type = other DNA
tctgccatacactcagggat

SEQ ID NO: 4539 - DNA, 20 bp, synthetic construct
  source 1..20: mol_type = other DNA
ccacatagtagaactgggta

SEQ ID NO: 4540 - DNA, 20 bp, synthetic construct
  source 1..20: mol_type = other DNA
tatactgaggaagattgtcg

SEQ ID NO: 4541 - DNA, 20 bp, synthetic construct
  source 1..20: mol_type = other DNA
aggatggtaggtatcccggg

SEQ ID NO: 4542 - DNA, 20 bp, synthetic construct
  source 1..20: mol_type = other DNA
agatagacaatggccagcgc

SEQ ID NO: 4543 - DNA, 20 bp, synthetic construct
  source 1..20: mol_type = other DNA
gccacgtggtgaccctcatc

SEQ ID NO: 4544 - DNA, 20 bp, synthetic construct
  source 1..20: mol_type = other DNA
ctccggcctgcagacgactt

SEQ ID NO: 4545 - DNA, 20 bp, synthetic construct
  source 1..20: mol_type = other DNA
aagcacatcttgaacttccc

SEQ ID NO: 4546 - DNA, 20 bp, synthetic construct
  source 1..20: mol_type = other DNA
tcatagtagtttccgtcctt

SEQ ID NO: 4547 - DNA, 20 bp, synthetic construct
  source 1..20: mol_type = other DNA
ccttgactgagatgatggct

SEQ ID NO: 4548 - DNA, 20 bp, synthetic construct
  source 1..20: mol_type = other DNA
aagtgtgtgaatgtagcgag

SEQ ID NO: 4549 - DNA, 20 bp, synthetic construct
  source 1..20: mol_type = other DNA
cttccagatacttagcgatt

SEQ ID NO: 4550 - DNA, 20 bp, synthetic construct
  source 1..20: mol_type = other DNA
cagtacagatcgattccagt

SEQ ID NO: 4551 - DNA, 20 bp, synthetic construct
  source 1..20: mol_type = other DNA
cagcgcgtacaagctgtggt

SEQ ID NO: 4552 - DNA, 20 bp, synthetic construct
  source 1..20: mol_type = other DNA
cgggagggcaatggctccga

SEQ ID NO: 4553 - DNA, 20 bp, synthetic construct
  source 1..20: mol_type = other DNA
tatggtgtagatgacaggat

SEQ ID NO: 4554 - DNA, 20 bp, synthetic construct
  source 1..20: mol_type = other DNA
cctgtcaaaaagcctgacaa

SEQ ID NO: 4555 - DNA, 20 bp, synthetic construct
  source 1..20: mol_type = other DNA
gcacttcctctttccttcag

SEQ ID NO: 4556 - DNA, 20 bp, synthetic construct
  source 1..20: mol_type = other DNA
ctgcaaacatttagcagagt

SEQ ID NO: 4557 - DNA, 20 bp, synthetic construct
  source 1..20: mol_type = other DNA
gagtctgacggaaagtattt

SEQ ID NO: 4558 - DNA, 20 bp, synthetic construct
  source 1..20: mol_type = other DNA
tcacactgagacgacagact

SEQ ID NO: 4559 - DNA, 20 bp, synthetic construct
  source 1..20: mol_type = other DNA
actctttcagcttggtcttc

SEQ ID NO: 4560 - DNA, 20 bp, synthetic construct
  source 1..20: mol_type = other DNA
gaagaattagtggtgctaca

SEQ ID NO: 4561 - DNA, 20 bp, synthetic construct
  source 1..20: mol_type = other DNA
agggaggaaaaagcgaaaac

SEQ ID NO: 4562 - DNA, 20 bp, synthetic construct
  source 1..20: mol_type = other DNA
ctcagaaccggttcttacca

SEQ ID NO: 4563 - DNA, 20 bp, synthetic construct
  source 1..20: mol_type = other DNA
gggaaggagacttgacgtca

SEQ ID NO: 4564 - DNA, 20 bp, synthetic construct
  source 1..20: mol_type = other DNA
ggaggcacccgactcggtga

SEQ ID NO: 4565 - DNA, 20 bp, synthetic construct
  source 1..20: mol_type = other DNA
ctcaatcaagttcagtttgc

SEQ ID NO: 4566 - DNA, 20 bp, synthetic construct
  source 1..20: mol_type = other DNA
gaaagctaggagtgtttgtc

SEQ ID NO: 4567 - DNA, 20 bp, synthetic construct
  source 1..20: mol_type = other DNA
cgagggaggattgttcgggt

SEQ ID NO: 4568 - DNA, 20 bp, synthetic construct
  source 1..20: mol_type = other DNA
ttggagaacagacccattgt

SEQ ID NO: 4569 - DNA, 20 bp, synthetic construct
  source 1..20: mol_type = other DNA
ctctttgaagccgacagttt

SEQ ID NO: 4570 - DNA, 20 bp, synthetic construct
  source 1..20: mol_type = other DNA
tttcccagaaaagtccatga

SEQ ID NO: 4571 - DNA, 20 bp, synthetic construct
  source 1..20: mol_type = other DNA
taaaactggaggcggagttc

SEQ ID NO: 4572 - DNA, 20 bp, synthetic construct
  source 1..20: mol_type = other DNA
cacggatgagttggagaata

SEQ ID NO: 4573 - DNA, 20 bp, synthetic construct
  source 1..20: mol_type = other DNA
tcgcaagtccttgaaattgc

SEQ ID NO: 4574 - DNA, 20 bp, synthetic construct
  source 1..20: mol_type = other DNA
tcaaggtgctgttcatgttc

SEQ ID NO: 4575 - DNA, 20 bp, synthetic construct
  source 1..20: mol_type = other DNA
gtcgccgatggaggtgacca

SEQ ID NO: 4576 - DNA, 20 bp, synthetic construct
  source 1..20: mol_type = other DNA
aaaaccaagctaagctgtgt

SEQ ID NO: 4577 - DNA, 20 bp, synthetic construct
  source 1..20: mol_type = other DNA
tggcagcagattaaagacaa

SEQ ID NO: 4578 - DNA, 20 bp, synthetic construct
  source 1..20: mol_type = other DNA
tcgtctgagtgagacgtact

SEQ ID NO: 4579 - DNA, 20 bp, synthetic construct
  source 1..20: mol_type = other DNA
aggagaacttgtcttcacaa

SEQ ID NO: 4580 - DNA, 20 bp, synthetic construct
  source 1..20: mol_type = other DNA
ggcttctctgatagccactt

SEQ ID NO: 4581 - DNA, 20 bp, synthetic construct
  source 1..20: mol_type = other DNA
atcctgggctttctaaggcg

SEQ ID NO: 4582 - DNA, 20 bp, synthetic construct
  source 1..20: mol_type = other DNA
ggtgcatttctggattcgac

SEQ ID NO: 4583 - DNA, 20 bp, synthetic construct
  source 1..20: mol_type = other DNA
ctcatgaggtcactgatacc

SEQ ID NO: 4584 - DNA, 20 bp, synthetic construct
  source 1..20: mol_type = other DNA
atcagtcctcgtttcttgag

SEQ ID NO: 4585 - DNA, 20 bp, synthetic construct
  source 1..20: mol_type = other DNA
ggcaccaactgactaatatc

SEQ ID NO: 4586 - DNA, 20 bp, synthetic construct
  source 1..20: mol_type = other DNA
aatggatcccaggtattggt

SEQ ID NO: 4587 - DNA, 20 bp, synthetic construct
  source 1..20: mol_type = other DNA
tgtggtaggtggcgacttgc

SEQ ID NO: 4588 - DNA, 20 bp, synthetic construct
  source 1..20: mol_type = other DNA
ctctagttccgtcatggtgc

SEQ ID NO: 4589 - DNA, 20 bp, synthetic construct
  source 1..20: mol_type = other DNA
gggagctgagtctttgggag

SEQ ID NO: 4590 - DNA, 20 bp, synthetic construct
  source 1..20: mol_type = other DNA
cagccgccggatgggaatgt

SEQ ID NO: 4591 - DNA, 20 bp, synthetic construct
  source 1..20: mol_type = other DNA
ggcaaatccaaagaatcccg

SEQ ID NO: 4592 - DNA, 20 bp, synthetic construct
  source 1..20: mol_type = other DNA
tgactcttcccataactact

SEQ ID NO: 4593 - DNA, 20 bp, synthetic construct
  source 1..20: mol_type = other DNA
gtcggagaagttgagccggc

SEQ ID NO: 4594 - DNA, 20 bp, synthetic construct
  source 1..20: mol_type = other DNA
ggtatgagctagtcaacagc

SEQ ID NO: 4595 - DNA, 20 bp, synthetic construct
  source 1..20: mol_type = other DNA
agaggaagacgatgccattg

SEQ ID NO: 4596 - DNA, 20 bp, synthetic construct
  source 1..20: mol_type = other DNA
cagaagatgttgggcttgtg

SEQ ID NO: 4597 - DNA, 20 bp, synthetic construct
  source 1..20: mol_type = other DNA
ggatgatccaggacatgacg

SEQ ID NO: 4598 - DNA, 20 bp, synthetic construct
  source 1..20: mol_type = other DNA
tggctctgtctcctagacaa

SEQ ID NO: 4599 - DNA, 20 bp, synthetic construct
  source 1..20: mol_type = other DNA
acagtgattgccattcggga

SEQ ID NO: 4600 - DNA, 20 bp, synthetic construct
  source 1..20: mol_type = other DNA
cgtccagaacgctggtcaga

SEQ ID NO: 4601 - DNA, 20 bp, synthetic construct
  source 1..20: mol_type = other DNA
ggccagggcgattacccact

SEQ ID NO: 4602 - DNA, 20 bp, synthetic construct
  source 1..20: mol_type = other DNA
cagtttctaatgcaagggtc

SEQ ID NO: 4603 - DNA, 20 bp, synthetic construct
  source 1..20: mol_type = other DNA
cacagtcgtccttcccattg

SEQ ID NO: 4604 - DNA, 20 bp, synthetic construct
  source 1..20: mol_type = other DNA
atttcagtctcagacccgtc

SEQ ID NO: 4605 - DNA, 20 bp, synthetic construct
  source 1..20: mol_type = other DNA
gcccattttgcctttgtctg

SEQ ID NO: 4606 - DNA, 20 bp, synthetic construct
  source 1..20: mol_type = other DNA
cgctgtttttttacatccgc

SEQ ID NO: 4607 - DNA, 20 bp, synthetic construct
  source 1..20: mol_type = other DNA
ttgaggccaaagcgagcacg

SEQ ID NO: 4608 - DNA, 20 bp, synthetic construct
  source 1..20: mol_type = other DNA
acagtgactcttgtccatta

SEQ ID NO: 4609 - DNA, 20 bp, synthetic construct
  source 1..20: mol_type = other DNA
tggagcatgggacctttatt

SEQ ID NO: 4610 - DNA, 20 bp, synthetic construct
  source 1..20: mol_type = other DNA
tttggatttccctttagggc

SEQ ID NO: 4611 - DNA, 20 bp, synthetic construct
  source 1..20: mol_type = other DNA
ttctggtgtggttccaaaga

SEQ ID NO: 4612 - DNA, 20 bp, synthetic construct
  source 1..20: mol_type = other DNA
tgactccatcaaatcggaac

SEQ ID NO: 4613 - DNA, 20 bp, synthetic construct
  source 1..20: mol_type = other DNA
cattgcagacacatctccaa

SEQ ID NO: 4614 - DNA, 20 bp, synthetic construct
  source 1..20: mol_type = other DNA
gacatttttgggtccctttg

SEQ ID NO: 4615 - DNA, 20 bp, synthetic construct
  source 1..20: mol_type = other DNA
ccatggtgacggtcgtgaag

SEQ ID NO: 4616 - DNA, 20 bp, synthetic construct
  source 1..20: mol_type = other DNA
atgggttgggtagagtttgt

SEQ ID NO: 4617 - DNA, 20 bp, synthetic construct
  source 1..20: mol_type = other DNA
ccaagtccgcaaaatacttt

SEQ ID NO: 4618 - DNA, 20 bp, synthetic construct
  source 1..20: mol_type = other DNA
aagcatgcagcgactttctt

SEQ ID NO: 4619 - DNA, 20 bp, synthetic construct
  source 1..20: mol_type = other DNA
ctgcaatatgctctggagca

SEQ ID NO: 4620 - DNA, 20 bp, synthetic construct
  source 1..20: mol_type = other DNA
gtgtaatgtgaagctctccc

SEQ ID NO: 4621 - DNA, 20 bp, synthetic construct
  source 1..20: mol_type = other DNA
ctcaccaaaccagggatatt

SEQ ID NO: 4622 - DNA, 20 bp, synthetic construct
  source 1..20: mol_type = other DNA
tgcatgactctcccaaagac

SEQ ID NO: 4623 - DNA, 20 bp, synthetic construct
  source 1..20: mol_type = other DNA
aaacagaaatggagagtcag

SEQ ID NO: 4624 - DNA, 20 bp, synthetic construct
  source 1..20: mol_type = other DNA
gtttccgacgagtttcataa

SEQ ID NO: 4625 - DNA, 20 bp, synthetic construct
  source 1..20: mol_type = other DNA
tcataagaagtggttgtgca

SEQ ID NO: 4626 - DNA, 20 bp, synthetic construct
  source 1..20: mol_type = other DNA
gcagccgcttaagcacctcc

SEQ ID NO: 4627 - DNA, 20 bp, synthetic construct
  source 1..20: mol_type = other DNA
tagggaggaagaaatcccga

SEQ ID NO: 4628 - DNA, 20 bp, synthetic construct
  source 1..20: mol_type = other DNA
tgagcccacctgacgcaaag

SEQ ID NO: 4629 - DNA, 20 bp, synthetic construct
  source 1..20: mol_type = other DNA
ctgatgtcctgcccgataag

SEQ ID NO: 4630 - DNA, 20 bp, synthetic construct
  source 1..20: mol_type = other DNA
ccagaagggccaacgctgtc

SEQ ID NO: 4631 - DNA, 20 bp, synthetic construct
  source 1..20: mol_type = other DNA
tgtgaggcatttctcaatgt

SEQ ID NO: 4632 - DNA, 20 bp, synthetic construct
  source 1..20: mol_type = other DNA
ggcatctgaatcagccaagt

SEQ ID NO: 4633 - DNA, 20 bp, synthetic construct
  source 1..20: mol_type = other DNA
actgaaagagatgaaggtag

SEQ ID NO: 4634 - DNA, 20 bp, synthetic construct
  source 1..20: mol_type = other DNA
gatggccaaatctttgatag

SEQ ID NO: 4635 - DNA, 20 bp, synthetic construct
  source 1..20: mol_type = other DNA
tcctgccaaagtcaacacta

SEQ ID NO: 4636 - DNA, 20 bp, synthetic construct
  source 1..20: mol_type = other DNA
tggtgaagacttgatgcaga

SEQ ID NO: 4637 - DNA, 20 bp, synthetic construct
  source 1..20: mol_type = other DNA
ttttgcatcctcacattagg

SEQ ID NO: 4638 - DNA, 20 bp, synthetic construct
  source 1..20: mol_type = other DNA
ctaagtctgtggtagaagcg

SEQ ID NO: 4639 - DNA, 20 bp, synthetic construct
  source 1..20: mol_type = other DNA
ctcttgaatcagcaagtccc

SEQ ID NO: 4640 - DNA, 20 bp, synthetic construct
  source 1..20: mol_type = other DNA
acaccatagctcttcttcac

SEQ ID NO: 4641 - DNA, 20 bp, synthetic construct
  source 1..20: mol_type = other DNA
caccgtttctaggacgatgc

SEQ ID NO: 4642 - DNA, 20 bp, synthetic construct
  source 1..20: mol_type = other DNA
ccgggtggttgtgcctcaga

SEQ ID NO: 4643 - DNA, 20 bp, synthetic construct
  source 1..20: mol_type = other DNA
aggacggacatacttgagac

SEQ ID NO: 4644 - DNA, 20 bp, synthetic construct
  source 1..20: mol_type = other DNA
tactgctgccaacttaagtc

SEQ ID NO: 4645 - DNA, 20 bp, synthetic construct
  source 1..20: mol_type = other DNA
tttagctaacttgcttgggt

SEQ ID NO: 4646 - DNA, 20 bp, synthetic construct
  source 1..20: mol_type = other DNA
gagttctctagtccacagcg

SEQ ID NO: 4647 - DNA, 20 bp, synthetic construct
  source 1..20: mol_type = other DNA
tcttagaagattccagaccc

SEQ ID NO: 4648 - DNA, 20 bp, synthetic construct
  source 1..20: mol_type = other DNA
actgtgatatccattcgctt

SEQ ID NO: 4649 - DNA, 20 bp, synthetic construct
  source 1..20: mol_type = other DNA
tttcccaatcttgtcatggg

SEQ ID NO: 4650 - DNA, 20 bp, synthetic construct
  source 1..20: mol_type = other DNA
agttcttctggaaagttcgg

SEQ ID NO: 4651 - DNA, 20 bp, synthetic construct
  source 1..20: mol_type = other DNA
tcgtcaaggatgcgtatgga

SEQ ID NO: 4652 - DNA, 20 bp, synthetic construct
  source 1..20: mol_type = other DNA
agccactgtagttaagagct

SEQ ID NO: 4653 - DNA, 20 bp, synthetic construct
  source 1..20: mol_type = other DNA
ttggatgcatggcactcata

SEQ ID NO: 4654 - DNA, 20 bp, synthetic construct
  source 1..20: mol_type = other DNA
tggagggaggcgctgcgtag

SEQ ID NO: 4655 - DNA, 20 bp, synthetic construct
  source 1..20: mol_type = other DNA
atgcccaaagtccaatttga

SEQ ID NO: 4656 - DNA, 20 bp, synthetic construct
  source 1..20: mol_type = other DNA
agggcaggaacgaaaatggg

SEQ ID NO: 4657 - DNA, 20 bp, synthetic construct
  source 1..20: mol_type = other DNA
ttgagaaactagacactgca

SEQ ID NO: 4658 - DNA, 20 bp, synthetic construct
  source 1..20: mol_type = other DNA
gatgactgaaaggcaggcgt

SEQ ID NO: 4659 - DNA, 20 bp, synthetic construct
  source 1..20: mol_type = other DNA
cctctgcgcaagcggcagct

SEQ ID NO: 4660 - DNA, 20 bp, synthetic construct
  source 1..20: mol_type = other DNA
cttgccttagcaaaaaatgc

SEQ ID NO: 4661 - DNA, 20 bp, synthetic construct
  source 1..20: mol_type = other DNA
tgctctctgatcagggctcg

SEQ ID NO: 4662 - DNA, 20 bp, synthetic construct
  source 1..20: mol_type = other DNA
aagaactaacactggagcgt

SEQ ID NO: 4663 - DNA, 20 bp, synthetic construct
  source 1..20: mol_type = other DNA
tctcttcttgcggtgtcgat

SEQ ID NO: 4664 - DNA, 20 bp, synthetic construct
  source 1..20: mol_type = other DNA
ttagagacgatgacatcgga

SEQ ID NO: 4665 - DNA, 20 bp, synthetic construct
  source 1..20: mol_type = other DNA
agtaacgctgtaccatccac

SEQ ID NO: 4666 - DNA, 20 bp, synthetic construct
  source 1..20: mol_type = other DNA
ggtacagatgatgtttgagt

SEQ ID NO: 4667 - DNA, 20 bp, synthetic construct
  source 1..20: mol_type = other DNA
tagctctttccgtcgtgctt

SEQ ID NO: 4668 - DNA, 20 bp, synthetic construct
  source 1..20: mol_type = other DNA
ttttagttacttccggaggt

SEQ ID NO: 4669 - DNA, 20 bp, synthetic construct
  source 1..20: mol_type = other DNA
gtggatttatatacacacgg

SEQ ID NO: 4670 - DNA, 20 bp, synthetic construct
  source 1..20: mol_type = other DNA
tccaaatactccacacgcaa

SEQ ID NO: 4671 - DNA, 20 bp, synthetic construct
  source 1..20: mol_type = other DNA
cattgttcaatatcgtccgg

SEQ ID NO: 4672 - DNA, 20 bp, synthetic construct
  source 1..20: mol_type = other DNA
caaacaaacccaatggcaac

SEQ ID NO: 4673 - DNA, 20 bp, synthetic construct
  source 1..20: mol_type = other DNA
ggcagtgtagactttaattc

SEQ ID NO: 4674 - DNA, 20 bp, synthetic construct
  source 1..20: mol_type = other DNA
aggtaacgagtcagagcttt

SEQ ID NO: 4675 - DNA, 20 bp, synthetic construct
  source 1..20: mol_type = other DNA
agcatcacaggaccattaat

SEQ ID NO: 4676 - DNA, 20 bp, synthetic construct
  source 1..20: mol_type = other DNA
tctctgggaaactcatgaaa

SEQ ID NO: 4677 - DNA, 20 bp, synthetic construct
  source 1..20: mol_type = other DNA
tccaggcatgcagtaaactg

SEQ ID NO: 4678 - DNA, 20 bp, synthetic construct
  source 1..20: mol_type = other DNA
tgctgcttctgaagaactga

SEQ ID NO: 4679 - DNA, 20 bp, synthetic construct
  source 1..20: mol_type = other DNA
gccagcagtaatcgaataac

SEQ ID NO: 4680 - DNA, 20 bp, synthetic construct
  source 1..20: mol_type = other DNA
ttgcaggctttttgtatagc

SEQ ID NO: 4681 - DNA, 20 bp, synthetic construct
  source 1..20: mol_type = other DNA
tagggaacagaaagttccaa

SEQ ID NO: 4682 - DNA, 20 bp, synthetic construct
  source 1..20: mol_type = other DNA
tgggctgcaactatagctac

SEQ ID NO: 4683 - DNA, 20 bp, synthetic construct
  source 1..20: mol_type = other DNA
gagcaccgtgactgcgttca

SEQ ID NO: 4684 - DNA, 20 bp, synthetic construct
  source 1..20: mol_type = other DNA
atgttagcgcgtagctaccc

SEQ ID NO: 4685 - DNA, 20 bp, synthetic construct
  source 1..20: mol_type = other DNA
cttgaccaataggttgacct

SEQ ID NO: 4686 - DNA, 20 bp, synthetic construct
  source 1..20: mol_type = other DNA
cccaggaactgtgtcctaga

SEQ ID NO: 4687 - DNA, 20 bp, synthetic construct
  source 1..20: mol_type = other DNA
caaaactgcagccagatcag

SEQ ID NO: 4688 - DNA, 20 bp, synthetic construct
  source 1..20: mol_type = other DNA
gcgatctcctcgttgagaga

SEQ ID NO: 4689 - DNA, 20 bp, synthetic construct
  source 1..20: mol_type = other DNA
aatgtttctggacacacagc

SEQ ID NO: 4690 - DNA, 20 bp, synthetic construct
  source 1..20: mol_type = other DNA
caatgtggtcgtggagtttc

SEQ ID NO: 4691 - DNA, 20 bp, synthetic construct
  source 1..20: mol_type = other DNA
tgggcatgcaggcgtagttc

SEQ ID NO: 4692 - DNA, 20 bp, synthetic construct
  source 1..20: mol_type = other DNA
tctgcctacacgtttatgag

SEQ ID NO: 4693 - DNA, 20 bp, synthetic construct
  source 1..20: mol_type = other DNA
gctccctctttggttgacct

SEQ ID NO: 4694 - DNA, 20 bp, synthetic construct
  source 1..20: mol_type = other DNA
ggcgaccagcataaatactg

SEQ ID NO: 4695 - DNA, 20 bp, synthetic construct
  source 1..20: mol_type = other DNA
acagcgcgttccctcctcgt

SEQ ID NO: 4696 - DNA, 20 bp, synthetic construct
  source 1..20: mol_type = other DNA
cggagcggcggtagttctca

SEQ ID NO: 4697 - DNA, 20 bp, synthetic construct
  source 1..20: mol_type = other DNA
tggccatttctgcaaagatt

SEQ ID NO: 4698 - DNA, 20 bp, synthetic construct
  source 1..20: mol_type = other DNA
ctgtcctgtggaggtgaagc

SEQ ID NO: 4699 - DNA, 20 bp, synthetic construct
  source 1..20: mol_type = other DNA
tccatgccaaaggcctctgc

SEQ ID NO: 4700 - DNA, 20 bp, synthetic construct
  source 1..20: mol_type = other DNA
cccttagccgcttccagaga

SEQ ID NO: 4701 - DNA, 20 bp, synthetic construct
  source 1..20: mol_type = other DNA
agtcagcagcatcaaagcat

SEQ ID NO: 4702 - DNA, 20 bp, synthetic construct
  source 1..20: mol_type = other DNA
aagctcatcagccattgtgg

SEQ ID NO: 4703 - DNA, 20 bp, synthetic construct
  source 1..20: mol_type = other DNA
cagtagaccagcttcatgac

SEQ ID NO: 4704 - DNA, 20 bp, synthetic construct
  source 1..20: mol_type = other DNA
ctcagggcttgtttcaaata

SEQ ID NO: 4705 - DNA, 20 bp, synthetic construct
  source 1..20: mol_type = other DNA
ttactaaggagctagcgaca

SEQ ID NO: 4706 - DNA, 20 bp, synthetic construct
  source 1..20: mol_type = other DNA
accacgttcttctccgataa

SEQ ID NO: 4707 - DNA, 20 bp, synthetic construct
  source 1..20: mol_type = other DNA
cccaaatgttccaccaactc

SEQ ID NO: 4708 - DNA, 20 bp, synthetic construct
  source 1..20: mol_type = other DNA
ctggtgagcctgctggcacg

SEQ ID NO: 4709 - DNA, 20 bp, synthetic construct
  source 1..20: mol_type = other DNA
cagctcctaggctttacgtg

SEQ ID NO: 4710 - DNA, 20 bp, synthetic construct
  source 1..20: mol_type = other DNA
tttgtcaatagcttgggtca

SEQ ID NO: 4711 - DNA, 20 bp, synthetic construct
  source 1..20: mol_type = other DNA
ccacaatgacattggagtct

SEQ ID NO: 4712 - DNA, 20 bp, synthetic construct
  source 1..20: mol_type = other DNA
tctgcaaatgagacactttc

SEQ ID NO: 4713 - DNA, 20 bp, synthetic construct
  source 1..20: mol_type = other DNA
ccgtggctgccacacatggt

SEQ ID NO: 4714 - DNA, 20 bp, synthetic construct
  source 1..20: mol_type = other DNA
agccgattgtgctggagatg

SEQ ID NO: 4715 - DNA, 20 bp, synthetic construct
  source 1..20: mol_type = other DNA
ggacagatccagctcaacca

SEQ ID NO: 4716 - DNA, 20 bp, synthetic construct
  source 1..20: mol_type = other DNA
gagaggcagatgctcaataa

SEQ ID NO: 4717 - DNA, 20 bp, synthetic construct
  source 1..20: mol_type = other DNA
acggtagttttgcttggact

SEQ ID NO: 4718 - DNA, 20 bp, synthetic construct
  source 1..20: mol_type = other DNA
gaccagttctcaacttgaag

SEQ ID NO: 4719 - DNA, 20 bp, synthetic construct
  source 1..20: mol_type = other DNA
ctcacttaaagtcaaggtgc

SEQ ID NO: 4720 - DNA, 20 bp, synthetic construct
  source 1..20: mol_type = other DNA
gtaagtaaagtgccaccagc

SEQ ID NO: 4721 - DNA, 20 bp, synthetic construct
  source 1..20: mol_type = other DNA
ggcatggtccacatctgctc

SEQ ID NO: 4722 - DNA, 20 bp, synthetic construct
  source 1..20: mol_type = other DNA
ctggaaaagatctttgcaac

SEQ ID NO: 4723 - DNA, 20 bp, synthetic construct
  source 1..20: mol_type = other DNA
cagctgtatgactttcagcc

SEQ ID NO: 4724 - DNA, 20 bp, synthetic construct
  source 1..20: mol_type = other DNA
gcttgatagtgcagttgtca

SEQ ID NO: 4725 - DNA, 20 bp, synthetic construct
  source 1..20: mol_type = other DNA
ttattgatccctgggttaac

SEQ ID NO: 4726 - DNA, 20 bp, synthetic construct
  source 1..20: mol_type = other DNA
atgtggttacagggaagcca

SEQ ID NO: 4727 - DNA, 20 bp, synthetic construct
  source 1..20: mol_type = other DNA
catcttctggatgtcatctt

SEQ ID NO: 4728 - DNA, 20 bp, synthetic construct
  source 1..20: mol_type = other DNA
gtctgcgttctctttctcca

SEQ ID NO: 4729 - DNA, 20 bp, synthetic construct
  source 1..20: mol_type = other DNA
attcatcaactactcgacca

SEQ ID NO: 4730 - DNA, 20 bp, synthetic construct
  source 1..20: mol_type = other DNA
tgccaccactcctcgtgaaa

SEQ ID NO: 4731 - DNA, 20 bp, synthetic construct
  source 1..20: mol_type = other DNA
cgaagagggcggcgagaatc

SEQ ID NO: 4732 - DNA, 20 bp, synthetic construct
  source 1..20: mol_type = other DNA
ctgggaacgggcacattggt

SEQ ID NO: 4733 - DNA, 20 bp, synthetic construct
  source 1..20: mol_type = other DNA
tgtctgagtgtggttgtaat

SEQ ID NO: 4734 - DNA, 20 bp, synthetic construct
  source 1..20: mol_type = other DNA
ggacaggcagtgcaacgtcc

SEQ ID NO: 4735 - DNA, 20 bp, synthetic construct
  source 1..20: mol_type = other DNA
ggaacgtagttatcgtaagg

SEQ ID NO: 4736 - DNA, 20 bp, synthetic construct
  source 1..20: mol_type = other DNA
aagtactttgcatacagacg

SEQ ID NO: 4737 - DNA, 20 bp, synthetic construct
  source 1..20: mol_type = other DNA
aacagcacgtcatccttata

SEQ ID NO: 4738 - DNA, 20 bp, synthetic construct
  source 1..20: mol_type = other DNA
ccagaagcttcgatgctcat

SEQ ID NO: 4739 - DNA, 20 bp, synthetic construct
  source 1..20: mol_type = other DNA
ttgtcggagacgcggatgcc

SEQ ID NO: 4740 - DNA, 20 bp, synthetic construct
  source 1..20: mol_type = other DNA
agtcgatgagcttgagctcg

SEQ ID NO: 4741 - DNA, 20 bp, synthetic construct
  source 1..20: mol_type = other DNA
ctggagggtcttctgcaggg

SEQ ID NO: 4742 - DNA, 20 bp, synthetic construct
  source 1..20: mol_type = other DNA
aggtgaaggcagtaatgatg

SEQ ID NO: 4743 - DNA, 20 bp, synthetic construct
  source 1..20: mol_type = other DNA
ttgatgatctcgcggaatat

SEQ ID NO: 4744 - DNA, 20 bp, synthetic construct
  source 1..20: mol_type = other DNA
taaggagaccactttgattg

SEQ ID NO: 4745 - DNA, 20 bp, synthetic construct
  source 1..20: mol_type = other DNA
gagcagagttcagtgtgcat

SEQ ID NO: 4746 - DNA, 20 bp, synthetic construct
  source 1..20: mol_type = other DNA
cctacatagaattgcctacc

SEQ ID NO: 4747 - DNA, 20 bp, synthetic construct
  source 1..20: mol_type = other DNA
agggtgtccagtcaatttgt

SEQ ID NO: 4748 - DNA, 20 bp, synthetic construct
  source 1..20: mol_type = other DNA
ttttcccttcttcgtgcatg

SEQ ID NO: 4749 - DNA, 20 bp, synthetic construct
  source 1..20: mol_type = other DNA
gcgggacttctcctctcaca

SEQ ID NO: 4750 - DNA, 20 bp, synthetic construct
  source 1..20: mol_type = other DNA
gacgtgggaatagccgtcag

SEQ ID NO: 4751 - DNA, 20 bp, synthetic construct
  source 1..20: mol_type = other DNA
acccgcaggatcttccagcc

SEQ ID NO: 4752 - DNA, 20 bp, synthetic construct
  source 1..20: mol_type = other DNA
tccgtaagcatttccgaagc

SEQ ID NO: 4753 - DNA, 20 bp, synthetic construct
  source 1..20: mol_type = other DNA
atccttcaggacaggcgaac

SEQ ID NO: 4754 - DNA, 20 bp, synthetic construct
  source 1..20: mol_type = other DNA
actgctcctccaacatttgt

SEQ ID NO: 4755 - DNA, 20 bp, synthetic construct
  source 1..20: mol_type = other DNA
atgcagcttagcactctgta

SEQ ID NO: 4756 - DNA, 20 bp, synthetic construct
  source 1..20: mol_type = other DNA
aggcaagggcagaatgtaca

SEQ ID NO: 4757 - DNA, 20 bp, synthetic construct
  source 1..20: mol_type = other DNA
ggaagtggaaaaccgtgtcc

SEQ ID NO: 4758 - DNA, 20 bp, synthetic construct
  source 1..20: mol_type = other DNA
tggcgatgcattttaagctc

SEQ ID NO: 4759 - DNA, 20 bp, synthetic construct
  source 1..20: mol_type = other DNA
tacgtgccagatttcaggca

SEQ ID NO: 4760 - DNA, 20 bp, synthetic construct
  source 1..20: mol_type = other DNA
gaccatcttcacaaatgttc

SEQ ID NO: 4761 - DNA, 20 bp, synthetic construct
  source 1..20: mol_type = other DNA
atagtgattctgtagctggc

SEQ ID NO: 4762 - DNA, 20 bp, synthetic construct
  source 1..20: mol_type = other DNA
tgttgtatttgctggtgaag

SEQ ID NO: 4763 - DNA, 20 bp, synthetic construct
  source 1..20: mol_type = other DNA
acgcggagccggtagtctag

SEQ ID NO: 4764 - DNA, 20 bp, synthetic construct
  source 1..20: mol_type = other DNA
gaagtcatgctcaaacatct

SEQ ID NO: 4765 - DNA, 20 bp, synthetic construct
  source 1..20: mol_type = other DNA
agcgcatgggttactattaa

SEQ ID NO: 4766 - DNA, 20 bp, synthetic construct
  source 1..20: mol_type = other DNA
tccaaatctatcttgcgctc

SEQ ID NO: 4767 - DNA, 20 bp, synthetic construct
  source 1..20: mol_type = other DNA
cagccacactttcatattgc

SEQ ID NO: 4768 - DNA, 20 bp, synthetic construct
  source 1..20: mol_type = other DNA
tcatgcatgatggcaccata

SEQ ID NO: 4769 - DNA, 20 bp, synthetic construct
  source 1..20: mol_type = other DNA
ggataaggcactggatatcc

SEQ ID NO: 4770 - DNA, 20 bp, synthetic construct
  source 1..20: mol_type = other DNA
ctcggcagaacttgacaatg

SEQ ID NO: 4771 - DNA, 20 bp, synthetic construct
  source 1..20: mol_type = other DNA
tgcaagtccaatgacgaaaa

SEQ ID NO: 4772 - DNA, 20 bp, synthetic construct
  source 1..20: mol_type = other DNA
cggatgcaagtctggccaac

SEQ ID NO: 4773 - DNA, 20 bp, synthetic construct
  source 1..20: mol_type = other DNA
ctgtgtggtgagtgtaaact

SEQ ID NO: 4774 - DNA, 20 bp, synthetic construct
  source 1..20: mol_type = other DNA
ttttggactgcacttcgcgg

SEQ ID NO: 4775 - DNA, 20 bp, synthetic construct
  source 1..20: mol_type = other DNA
gtgcgagcttcagtttgaga

SEQ ID NO: 4776 - DNA, 20 bp, synthetic construct
  source 1..20: mol_type = other DNA
gagtcatacaggaaatcctg

SEQ ID NO: 4777 - DNA, 20 bp, synthetic construct
  source 1..20: mol_type = other DNA
acccatttcttctctgggtt

SEQ ID NO: 4778 - DNA, 20 bp, synthetic construct
  source 1..20: mol_type = other DNA
cgagaacgagatgtggacag

SEQ ID NO: 4779 - DNA, 20 bp, synthetic construct
  source 1..20: mol_type = other DNA
tgaatgcgtgagccctttgc

SEQ ID NO: 4780 - DNA, 20 bp, synthetic construct
  source 1..20: mol_type = other DNA
aatgccgtcaaggttcttca

SEQ ID NO: 4781 - DNA, 20 bp, synthetic construct
  source 1..20: mol_type = other DNA
ccagtggatcgggtgtaaac

SEQ ID NO: 4782 - DNA, 20 bp, synthetic construct
  source 1..20: mol_type = other DNA
tttgtagtcctgctgcgatt

SEQ ID NO: 4783 - DNA, 20 bp, synthetic construct
  source 1..20: mol_type = other DNA
gggattaatgcccttatagc

SEQ ID NO: 4784 - DNA, 20 bp, synthetic construct
  source 1..20: mol_type = other DNA
gccatcagtccgcgttcgcc

SEQ ID NO: 4785 - DNA, 20 bp, synthetic construct
  source 1..20: mol_type = other DNA
aacgccctgtcgcccacgac

SEQ ID NO: 4786 - DNA, 20 bp, synthetic construct
  source 1..20: mol_type = other DNA
caaggatcccgactgcaata

SEQ ID NO: 4787 - DNA, 20 bp, synthetic construct
  source 1..20: mol_type = other DNA
ttggacactgaacattgtcc

SEQ ID NO: 4788 - DNA, 20 bp, synthetic construct
  source 1..20: mol_type = other DNA
gccacggtgacaataatact

SEQ ID NO: 4789 - DNA, 20 bp, synthetic construct
  source 1..20: mol_type = other DNA
gagacccaagagaaatcggg

SEQ ID NO: 4790 - DNA, 20 bp, synthetic construct
  source 1..20: mol_type = other DNA
ttcactgagcctatcatatg

SEQ ID NO: 4791 - DNA, 20 bp, synthetic construct
  source 1..20: mol_type = other DNA
gaacaaggcagtgagaatga

SEQ ID NO: 4792 - DNA, 20 bp, synthetic construct
  source 1..20: mol_type = other DNA
cagggcctgcatgtgaaggg

SEQ ID NO: 4793 - DNA, 20 bp, synthetic construct
  source 1..20: mol_type = other DNA
ctgggatgaccaattcagct

SEQ ID NO: 4794 - DNA, 20 bp, synthetic construct
  source 1..20: mol_type = other DNA
taaatactgtcccgttccaa

SEQ ID NO: 4795 - DNA, 20 bp, synthetic construct
  source 1..20: mol_type = other DNA
ctggtcccggccttcggtga

SEQ ID NO: 4796 - DNA, 20 bp, synthetic construct
  source 1..20: mol_type = other DNA
ctgagacgaccgagcggtca

SEQ ID NO: 4797 - DNA, 20 bp, synthetic construct
  source 1..20: mol_type = other DNA
ggccactgttactagcaagc

SEQ ID NO: 4798 - DNA, 20 bp, synthetic construct
  source 1..20: mol_type = other DNA
gcattcacatgacacagaac

SEQ ID NO: 4799 - DNA, 20 bp, synthetic construct
  source 1..20: mol_type = other DNA
acatggaaagctcatcttag

SEQ ID NO: 4800 - DNA, 20 bp, synthetic construct
  source 1..20: mol_type = other DNA
ccaatcacttgatttatcgc

SEQ ID NO: 4801 - DNA, 20 bp, synthetic construct
  source 1..20: mol_type = other DNA
agtgcacctttcatgtgcaa

SEQ ID NO: 4802 - DNA, 20 bp, synthetic construct
  source 1..20: mol_type = other DNA
gttctaagtagccaatccta

SEQ ID NO: 4803 - DNA, 20 bp, synthetic construct
  source 1..20: mol_type = other DNA
caggcagatgccctgagtca

SEQ ID NO: 4804 - DNA, 20 bp, synthetic construct
  source 1..20: mol_type = other DNA
tcttatgcctcctgttaact

SEQ ID NO: 4805 - DNA, 20 bp, synthetic construct
  source 1..20: mol_type = other DNA
gtcaaagattttactgcggg

SEQ ID NO: 4806 - DNA, 20 bp, synthetic construct
  source 1..20: mol_type = other DNA
cgtggacatggcactaaaca

SEQ ID NO: 4807 - DNA, 20 bp, synthetic construct
  source 1..20: mol_type = other DNA
tgatagacctggtcattcct

SEQ ID NO: 4808 - DNA, 20 bp, synthetic construct
  source 1..20: mol_type = other DNA
agcccagtttcctccaaggt

SEQ ID NO: 4809 - DNA, 20 bp, synthetic construct
  source 1..20: mol_type = other DNA
caggtagagataaaagttcg

SEQ ID NO: 4810 - DNA, 20 bp, synthetic construct
  source 1..20: mol_type = other DNA
gcccgactgcatctttgttt

SEQ ID NO: 4811 - DNA, 20 bp, synthetic construct
  source 1..20: mol_type = other DNA
tatttgcagctctgagtaag

SEQ ID NO: 4812 - DNA, 20 bp, synthetic construct
  source 1..20: mol_type = other DNA
ataggaacccagagtcaacc

SEQ ID NO: 4813 - DNA, 20 bp, synthetic construct
  source 1..20: mol_type = other DNA
catcatcagtagggttgctg

SEQ ID NO: 4814 - DNA, 20 bp, synthetic construct
  source 1..20: mol_type = other DNA
caagaatcaaagccaaggcc

SEQ ID NO: 4815 - DNA, 20 bp, synthetic construct
  source 1..20: mol_type = other DNA
gagctaagatactcaaacct

SEQ ID NO: 4816 - DNA, 20 bp, synthetic construct
  source 1..20: mol_type = other DNA
acaatcacgtaagggtctca

SEQ ID NO: 4817 - DNA, 20 bp, synthetic construct
  source 1..20: mol_type = other DNA
tgcccgctgcttctcaaaca

SEQ ID NO: 4818 - DNA, 20 bp, synthetic construct
  source 1..20: mol_type = other DNA
caccaggttcacttcctgat

SEQ ID NO: 4819 - DNA, 20 bp, synthetic construct
  source 1..20: mol_type = other DNA
cagtgtgcagtccatattaa

SEQ ID NO: 4820 - DNA, 20 bp, synthetic construct
  source 1..20: mol_type = other DNA
aattctttcactgaagtgcc

SEQ ID NO: 4821 - DNA, 20 bp, synthetic construct
  source 1..20: mol_type = other DNA
ctatggtctccatggtgttc

SEQ ID NO: 4822 - DNA, 20 bp, synthetic construct
  source 1..20: mol_type = other DNA
gaggctgctacaatcagctc

SEQ ID NO: 4823 - DNA, 20 bp, synthetic construct
  source 1..20: mol_type = other DNA
tgaaatccagtttgctgcta

SEQ ID NO: 4824 - DNA, 20 bp, synthetic construct
  source 1..20: mol_type = other DNA
gtcacttcagccaggtgttc

SEQ ID NO: 4825 - DNA, 20 bp, synthetic construct
  source 1..20: mol_type = other DNA
actgttggaagtacagctgt

SEQ ID NO: 4826 - DNA, 20 bp, synthetic construct
  source 1..20: mol_type = other DNA
gtgggctttttgtgatggat

SEQ ID NO: 4827 - DNA, 20 bp, synthetic construct
  source 1..20: mol_type = other DNA
gccggcccggagcctgattt

SEQ ID NO: 4828 - DNA, 20 bp, synthetic construct
  source 1..20: mol_type = other DNA
ctcagcatgattctgagaac

SEQ ID NO: 4829 - DNA, 20 bp, synthetic construct
  source 1..20: mol_type = other DNA
tggaatgtgccattgacaga

SEQ ID NO: 4830 - DNA, 20 bp, synthetic construct
  source 1..20: mol_type = other DNA
cgtgctgcagttagacgaaa

SEQ ID NO: 4831 - DNA, 20 bp, synthetic construct
  source 1..20: mol_type = other DNA
ctctgttctgaatccaattg

SEQ ID NO: 4832 - DNA, 20 bp, synthetic construct
  source 1..20: mol_type = other DNA
catccttcaccagtttatag

SEQ ID NO: 4833 - DNA, 20 bp, synthetic construct
  source 1..20: mol_type = other DNA
acgtcgctctgaaccgtgta

SEQ ID NO: 4834 - DNA, 20 bp, synthetic construct
  source 1..20: mol_type = other DNA
cacgcaatcaagcactgcta

SEQ ID NO: 4835 - DNA, 20 bp, synthetic construct
  source 1..20: mol_type = other DNA
cttccttgcaaaccattgaa

SEQ ID NO: 4836 - DNA, 20 bp, synthetic construct
  source 1..20: mol_type = other DNA
tgcagcctttgtttccatat

SEQ ID NO: 4837 - DNA, 20 bp, synthetic construct
  source 1..20: mol_type = other DNA
agcagttgctcccacagtaa

SEQ ID NO: 4838 - DNA, 20 bp, synthetic construct
  source 1..20: mol_type = other DNA
gattgcgcgtttgccgcatg

SEQ ID NO: 4839 - DNA, 20 bp, synthetic construct
  source 1..20: mol_type = other DNA
ggaagagccagaacaaagtg

SEQ ID NO: 4840 - DNA, 20 bp, synthetic construct
  source 1..20: mol_type = other DNA
tctcagtttggtggcggtgg

SEQ ID NO: 4841 - DNA, 20 bp, synthetic construct
  source 1..20: mol_type = other DNA
cgccctgaatccagcgtcct

SEQ ID NO: 4842 - DNA, 20 bp, synthetic construct
  source 1..20: mol_type = other DNA
gacgagggtgcaggatccca

SEQ ID NO: 4843 - DNA, 20 bp, synthetic construct
  source 1..20: mol_type = other DNA
caccaccagcgcgtagtagg

SEQ ID NO: 4844 - DNA, 20 bp, synthetic construct
  source 1..20: mol_type = other DNA
tgggcattaacacttttgga

SEQ ID NO: 4845 - DNA, 20 bp, synthetic construct
  source 1..20: mol_type = other DNA
ggaatcacaggactcgattt

SEQ ID NO: 4846 - DNA, 20 bp, synthetic construct
  source 1..20: mol_type = other DNA
catgcggatcaagttctgcg

SEQ ID NO: 4847 - DNA, 20 bp, synthetic construct
  source 1..20: mol_type = other DNA
cagggcaatgacataaattg

SEQ ID NO: 4848 - DNA, 20 bp, synthetic construct
  source 1..20: mol_type = other DNA
tactctgtaaccagtaacag

SEQ ID NO: 4849 - DNA, 20 bp, synthetic construct
  source 1..20: mol_type = other DNA
gcgtggcgtaggtgaaaggg

SEQ ID NO: 4850 - DNA, 20 bp, synthetic construct
  source 1..20: mol_type = other DNA
gtagggcgggacgtggttgc

SEQ ID NO: 4851 - DNA, 20 bp, synthetic construct
  source 1..20: mol_type = other DNA
gctcggtcagattgcgttgc

SEQ ID NO: 4852 - DNA, 20 bp, synthetic construct
  source 1..20: mol_type = other DNA
tcatgaaatttctgcagacg

SEQ ID NO: 4853 - DNA, 20 bp, synthetic construct
  source 1..20: mol_type = other DNA
gcacaatcctagacagtgta

SEQ ID NO: 4854 - DNA, 20 bp, synthetic construct
  source 1..20: mol_type = other DNA
agcgcagttatcctacacaa

SEQ ID NO: 4855 - DNA, 20 bp, synthetic construct
  source 1..20: mol_type = other DNA
gcggtcaatactcaggcagg

SEQ ID NO: 4856 - DNA, 20 bp, synthetic construct
  source 1..20: mol_type = other DNA
gaggcttccagcacaaacca

SEQ ID NO: 4857 - DNA, 20 bp, synthetic construct
  source 1..20: mol_type = other DNA
caccctgcaacttggcacat

SEQ ID NO: 4858 - DNA, 20 bp, synthetic construct
  source 1..20: mol_type = other DNA
gggcttagtttgcttcctgt

SEQ ID NO: 4859 - DNA, 20 bp, synthetic construct
  source 1..20: mol_type = other DNA
ctgtaattgccatggaagag

SEQ ID NO: 4860 - DNA, 20 bp, synthetic construct
  source 1..20: mol_type = other DNA
cagttctagagatctgcact

SEQ ID NO: 4861 - DNA, 20 bp, synthetic construct
  source 1..20: mol_type = other DNA
tcagaacacctccacaaacg

SEQ ID NO: 4862 - DNA, 20 bp, synthetic construct
  source 1..20: mol_type = other DNA
gtcccgtaagtcattggcca

SEQ ID NO: 4863 - DNA, 20 bp, synthetic construct
  source 1..20: mol_type = other DNA
gcattgcaaagcgacaaccc

SEQ ID NO: 4864 - DNA, 20 bp, synthetic construct
  source 1..20: mol_type = other DNA
cattgcttttgcgcaatccc

SEQ ID NO: 4865 - DNA, 20 bp, synthetic construct
  source 1..20: mol_type = other DNA
tatgaaacagatgaggacgt

SEQ ID NO: 4866 - DNA, 20 bp, synthetic construct
  source 1..20: mol_type = other DNA
tccaagtaagagaacaccct

SEQ ID NO: 4867 - DNA, 20 bp, synthetic construct
  source 1..20: mol_type = other DNA
aggctttcatgctgaccgcg

SEQ ID NO: 4868 - DNA, 20 bp, synthetic construct
  source 1..20: mol_type = other DNA
ggtgaaacacttgaagggct

SEQ ID NO: 4869 - DNA, 20 bp, synthetic construct
  source 1..20: mol_type = other DNA
aagttctgtctgacatgcca

SEQ ID NO: 4870 - DNA, 20 bp, synthetic construct
  source 1..20: mol_type = other DNA
acagtcacagttgtcaacaa

SEQ ID NO: 4871 - DNA, 20 bp, synthetic construct
  source 1..20: mol_type = other DNA
gtgtgctggaccacgcattt

SEQ ID NO: 4872 - DNA, 20 bp, synthetic construct
  source 1..20: mol_type = other DNA
ctctttgatggtcagtgtgc

SEQ ID NO: 4873 - DNA, 20 bp, synthetic construct
  source 1..20: mol_type = other DNA
ttatttcagggcaacaagcg

SEQ ID NO: 4874 - DNA, 20 bp, synthetic construct
  source 1..20: mol_type = other DNA
cagagctttgtgttcaaggc

SEQ ID NO: 4875 - DNA, 20 bp, synthetic construct
  source 1..20: mol_type = other DNA
ttcatagcaggtactttcag

SEQ ID NO: 4876 - DNA, 20 bp, synthetic construct
  source 1..20: mol_type = other DNA
gggagttcacatgcgccttg

SEQ ID NO: 4877 - DNA, 20 bp, synthetic construct
  source 1..20: mol_type = other DNA
gtgcatgccttcttttgcaa

SEQ ID NO: 4878 - DNA, 20 bp, synthetic construct
  source 1..20: mol_type = other DNA
ttcagatctcatatcttggc

SEQ ID NO: 4879 - DNA, 20 bp, synthetic construct
  source 1..20: mol_type = other DNA
cagcgttgatgcagcccaag

SEQ ID NO: 4880 - DNA, 20 bp, synthetic construct
  source 1..20: mol_type = other DNA
tttcaacacgcaggacaggt

SEQ ID NO: 4881 - DNA, 20 bp, synthetic construct
  source 1..20: mol_type = other DNA
tgtagacaacaggaaagtcc

SEQ ID NO: 4882 - DNA, 20 bp, synthetic construct
  source 1..20: mol_type = other DNA
ttgacattggttgtcccagg

SEQ ID NO: 4883 - DNA, 20 bp, synthetic construct
  source 1..20: mol_type = other DNA
tgtcacccttgtgggtccat

SEQ ID NO: 4884 - DNA, 20 bp, synthetic construct
  source 1..20: mol_type = other DNA
cagggtcttcctctgagtag

SEQ ID NO: 4885 - DNA, 20 bp, synthetic construct
  source 1..20: mol_type = other DNA
cctgcagttgatcagcaagt

SEQ ID NO: 4886 - DNA, 20 bp, synthetic construct
  source 1..20: mol_type = other DNA
tggcttgttcctcactactc

SEQ ID NO: 4887 - DNA, 20 bp, synthetic construct
  source 1..20: mol_type = other DNA
tgagtggctgtctgtgtggg

SEQ ID NO: 4888 - DNA, 20 bp, synthetic construct
  source 1..20: mol_type = other DNA
tgttttcatccttttcctgg

SEQ ID NO: 4889 - DNA, 20 bp, synthetic construct
  source 1..20: mol_type = other DNA
tcctctgagatcatggacgg

SEQ ID NO: 4890 - DNA, 20 bp, synthetic construct
  source 1..20: mol_type = other DNA
agggagttcatggcacagcg

SEQ ID NO: 4891 - DNA, 20 bp, synthetic construct
  source 1..20: mol_type = other DNA
cagcagggtgaacacggaat

SEQ ID NO: 4892 - DNA, 20 bp, synthetic construct
  source 1..20: mol_type = other DNA
ctggatgccaaagaacggga

SEQ ID NO: 4893 - DNA, 20 bp, synthetic construct
  source 1..20: mol_type = other DNA
ctcccaagcaggttcttaga

SEQ ID NO: 4894 - DNA, 20 bp, synthetic construct
  source 1..20: mol_type = other DNA
actacactcaacacgccgcg

SEQ ID NO: 4895 - DNA, 20 bp, synthetic construct
  source 1..20: mol_type = other DNA
gtctgaaactggttggagtt

SEQ ID NO: 4896 - DNA, 20 bp, synthetic construct
  source 1..20: mol_type = other DNA
tgcagtcagcaatgacttaa

SEQ ID NO: 4897 - DNA, 20 bp, synthetic construct
  source 1..20: mol_type = other DNA
ttggagcatgccattcacga

SEQ ID NO: 4898 - DNA, 20 bp, synthetic construct
  source 1..20: mol_type = other DNA
ctccttcggtgccttttaat

SEQ ID NO: 4899 - DNA, 20 bp, synthetic construct
  source 1..20: mol_type = other DNA
catgaggaactcgcaagaga

SEQ ID NO: 4900 - DNA, 20 bp, synthetic construct
  source 1..20: mol_type = other DNA
gttgctgccaatatattggg

SEQ ID NO: 4901 - DNA, 20 bp, synthetic construct
  source 1..20: mol_type = other DNA
ctgtgttttgaagctgaagc

SEQ ID NO: 4902 - DNA, 20 bp, synthetic construct
  source 1..20: mol_type = other DNA
gaacaacttcctttttggca

SEQ ID NO: 4903 - DNA, 20 bp, synthetic construct
  source 1..20: mol_type = other DNA
caactgcatgcaccaaaagc

SEQ ID NO: 4904 - DNA, 20 bp, synthetic construct
  source 1..20: mol_type = other DNA
tcagccaccacctgaaaatt

SEQ ID NO: 4905 - DNA, 20 bp, synthetic construct
  source 1..20: mol_type = other DNA
cctggctcacatcctctagt

SEQ ID NO: 4906 - DNA, 20 bp, synthetic construct
  source 1..20: mol_type = other DNA
ttctgtcaggaaccctgtgt

SEQ ID NO: 4907 - DNA, 20 bp, synthetic construct
  source 1..20: mol_type = other DNA
ttcagggcaagaatagagat

SEQ ID NO: 4908 - DNA, 20 bp, synthetic construct
  source 1..20: mol_type = other DNA
ctcatcagcagcccagttag

SEQ ID NO: 4909 - DNA, 20 bp, synthetic construct
  source 1..20: mol_type = other DNA
acccagaagacgcatgtaaa

SEQ ID NO: 4910 - DNA, 20 bp, synthetic construct
  source 1..20: mol_type = other DNA
tgcttattgtcagtctcttc

SEQ ID NO: 4911 - DNA, 20 bp, synthetic construct
  source 1..20: mol_type = other DNA
ctcaaatctcaagggctgat

SEQ ID NO: 4912 - DNA, 20 bp, synthetic construct
  source 1..20: mol_type = other DNA
cactgcagtacagttgtagt

SEQ ID NO: 4913 - DNA, 20 bp, synthetic construct
  source 1..20: mol_type = other DNA
cttccttggcatcataccac

SEQ ID NO: 4914 - DNA, 20 bp, synthetic construct
  source 1..20: mol_type = other DNA
ctttgttaatccgctcaggg

SEQ ID NO: 4915 - DNA, 20 bp, synthetic construct
  source 1..20: mol_type = other DNA
gcccacagaacagccataat

SEQ ID NO: 4916 - DNA, 20 bp, synthetic construct
  source 1..20: mol_type = other DNA
tgttcacttccctctttgtt

SEQ ID NO: 4917 - DNA, 20 bp, synthetic construct
  source 1..20: mol_type = other DNA
ctcacttggacttgaggtat

SEQ ID NO: 4918 - DNA, 20 bp, synthetic construct
  source 1..20: mol_type = other DNA
cattccgctaggaaagacaa

SEQ ID NO: 4919 - DNA, 20 bp, synthetic construct
  source 1..20: mol_type = other DNA
cgcaggcgcaaacctcacta

SEQ ID NO: 4920 - DNA, 20 bp, synthetic construct
  source 1..20: mol_type = other DNA
aaaagccttgttggaaggct

SEQ ID NO: 4921 - DNA, 20 bp, synthetic construct
  source 1..20: mol_type = other DNA
agactggttgtccagagatg

SEQ ID NO: 4922 - DNA, 20 bp, synthetic construct
  source 1..20: mol_type = other DNA
ggactccatatttgaggaga

SEQ ID NO: 4923 - DNA, 20 bp, synthetic construct
  source 1..20: mol_type = other DNA
cattgtcagctctccgggat

SEQ ID NO: 4924 - DNA, 20 bp, synthetic construct
  source 1..20: mol_type = other DNA
ttccgtgccgtaggacgcgt

SEQ ID NO: 4925 - DNA, 20 bp, synthetic construct
  source 1..20: mol_type = other DNA
gcggcactccaccgtgtcag

SEQ ID NO: 4926 - DNA, 20 bp, synthetic construct
  source 1..20: mol_type = other DNA
ggcctccatttgtctcaggg

SEQ ID NO: 4927 - DNA, 20 bp, synthetic construct
  source 1..20: mol_type = other DNA
ccgtacagttctctctgagg

SEQ ID NO: 4928 - DNA, 20 bp, synthetic construct
  source 1..20: mol_type = other DNA
tcagtttgaagtgatagcca

SEQ ID NO: 4929 - DNA, 20 bp, synthetic construct
  source 1..20: mol_type = other DNA
gaagatgttccataagtccc

SEQ ID NO: 4930 - DNA, 20 bp, synthetic construct
  source 1..20: mol_type = other DNA
caggtagaaatcttcccaga

SEQ ID NO: 4931 - DNA, 20 bp, synthetic construct
  source 1..20: mol_type = other DNA
ccatagcggtggacccatgt

SEQ ID NO: 4932 - DNA, 20 bp, synthetic construct
  source 1..20: mol_type = other DNA
ccactccactagttcatcat

SEQ ID NO: 4933 - DNA, 20 bp, synthetic construct
  source 1..20: mol_type = other DNA
gctgccgaacttgctgcaga

SEQ ID NO: 4934 - DNA, 20 bp, synthetic construct
  source 1..20: mol_type = other DNA
tccttctttgctgctttcac

SEQ ID NO: 4935 - DNA, 20 bp, synthetic construct
  source 1..20: mol_type = other DNA
gaagaatcgttgccatggtt

SEQ ID NO: 4936 - DNA, 20 bp, synthetic construct
  source 1..20: mol_type = other DNA
caggttttctctcaacaccg

SEQ ID NO: 4937 - DNA, 20 bp, synthetic construct
  source 1..20: mol_type = other DNA
ccaggaagtctgcattatca

SEQ ID NO: 4938 - DNA, 20 bp, synthetic construct
  source 1..20: mol_type = other DNA
tagaatccagtcagtgaggc

SEQ ID NO: 4939 - DNA, 20 bp, synthetic construct
  source 1..20: mol_type = other DNA
cctcaacgatatgcagccgg

SEQ ID NO: 4940 - DNA, 20 bp, synthetic construct
  source 1..20: mol_type = other DNA
acacaaccaccacaaacaat

SEQ ID NO: 4941 - DNA, 20 bp, synthetic construct
  source 1..20: mol_type = other DNA
cctattctcacttctctcca

SEQ ID NO: 4942 - DNA, 20 bp, synthetic construct
  source 1..20: mol_type = other DNA
tggtggagaagacacaggca

SEQ ID NO: 4943 - DNA, 20 bp, synthetic construct
  source 1..20: mol_type = other DNA
ggtgacatcaaaagataacc

SEQ ID NO: 4944 - DNA, 20 bp, synthetic construct
  source 1..20: mol_type = other DNA
tgagaagcaggaaaggccgg

SEQ ID NO: 4945 - DNA, 20 bp, synthetic construct
  source 1..20: mol_type = other DNA
agcccaaaatgctggccatt

SEQ ID NO: 4946 - DNA, 20 bp, synthetic construct
  source 1..20: mol_type = other DNA
ccaagtcagcattacaaatg

SEQ ID NO: 4947 - DNA, 20 bp, synthetic construct
  source 1..20: mol_type = other DNA
gtaggtcactgttgctaatg

SEQ ID NO: 4948 - DNA, 20 bp, synthetic construct
  source 1..20: mol_type = other DNA
tgaatgaaactccaggagta

SEQ ID NO: 4949 - DNA, 20 bp, synthetic construct
  source 1..20: mol_type = other DNA
ccatttctactgagatctag

SEQ ID NO: 4950 - DNA, 20 bp, synthetic construct
  source 1..20: mol_type = other DNA
atcagcccatatgtttctgg

SEQ ID NO: 4951 - DNA, 20 bp, synthetic construct
  source 1..20: mol_type = other DNA
gagtggaaagcaatggtcag

SEQ ID NO: 4952 - DNA, 20 bp, synthetic construct
  source 1..20: mol_type = other DNA
tccacagttagaggacaaaa

SEQ ID NO: 4953 - DNA, 20 bp, synthetic construct
  source 1..20: mol_type = other DNA
tgccggtcggagactcccgt

SEQ ID NO: 4954 - DNA, 20 bp, synthetic construct
  source 1..20: mol_type = other DNA
caacgcagtcgacgtcagcg

SEQ ID NO: 4955 - DNA, 20 bp, synthetic construct
  source 1..20: mol_type = other DNA
tagcaaggatgtggatcaat

SEQ ID NO: 4956 - DNA, 20 bp, synthetic construct
  source 1..20: mol_type = other DNA
tggaccttcttcctctgaat

SEQ ID NO: 4957 - DNA, 20 bp, synthetic construct
  source 1..20: mol_type = other DNA
ttctgtggagtcatccatat

SEQ ID NO: 4958 - DNA, 20 bp, synthetic construct
  source 1..20: mol_type = other DNA
agaaagaaaaaagctagccc

SEQ ID NO: 4959 - DNA, 20 bp, synthetic construct
  source 1..20: mol_type = other DNA
cagactcggcaaagtcgaga

SEQ ID NO: 4960 - DNA, 20 bp, synthetic construct
  source 1..20: mol_type = other DNA
cacacattcctgaatcccag

SEQ ID NO: 4961 - DNA, 20 bp, synthetic construct
  source 1..20: mol_type = other DNA
ccatcttcccaggcatttta

SEQ ID NO: 4962 - DNA, 20 bp, synthetic construct
  source 1..20: mol_type = other DNA
gcaattcttttacagcctgc

SEQ ID NO: 4963 - DNA, 20 bp, synthetic construct
  source 1..20: mol_type = other DNA
gcaaggcaaggctccaatgc

SEQ ID NO: 4964 - DNA, 20 bp, synthetic construct
  source 1..20: mol_type = other DNA
cagggctgggtttgtcggtg

SEQ ID NO: 4965 - DNA, 20 bp, synthetic construct
  source 1..20: mol_type = other DNA
gctgatgacagccactcggt

SEQ ID NO: 4966 - DNA, 20 bp, synthetic construct
  source 1..20: mol_type = other DNA
ggaagcttcctcgcggtgta

SEQ ID NO: 4967 - DNA, 20 bp, synthetic construct
  source 1..20: mol_type = other DNA
gaaagaatgatgctcgagtt

SEQ ID NO: 4968 - DNA, 20 bp, synthetic construct
  source 1..20: mol_type = other DNA
ggttgtgtacatgactcgaa

SEQ ID NO: 4969 - DNA, 20 bp, synthetic construct
  source 1..20: mol_type = other DNA
cagatattcctgctgatgtg

SEQ ID NO: 4970 - DNA, 20 bp, synthetic construct
  source 1..20: mol_type = other DNA
agcagagttgtcaagaacca

SEQ ID NO: 4971 - DNA, 20 bp, synthetic construct
  source 1..20: mol_type = other DNA
gaggactcatcgttatatac

SEQ ID NO: 4972 - DNA, 20 bp, synthetic construct
  source 1..20: mol_type = other DNA
gagagttggataagggatct

SEQ ID NO: 4973 - DNA, 20 bp, synthetic construct
  source 1..20: mol_type = other DNA
ggtagccgtttatggatgta

SEQ ID NO: 4974 - DNA, 20 bp, synthetic construct
  source 1..20: mol_type = other DNA
tagcggctgtccacgttttc

SEQ ID NO: 4975 - DNA, 20 bp, synthetic construct
  source 1..20: mol_type = other DNA
ctcaggccggtcagtgtgca

SEQ ID NO: 4976 - DNA, 20 bp, synthetic construct
  source 1..20: mol_type = other DNA
cagttgaacttgacctcagg

SEQ ID NO: 4977 - DNA, 20 bp, synthetic construct
  source 1..20: mol_type = other DNA
aggaaggccgtctgagtgag

SEQ ID NO: 4978 - DNA, 20 bp, synthetic construct
  source 1..20: mol_type = other DNA
cttttgactactggacatct

SEQ ID NO: 4979 - DNA, 20 bp, synthetic construct
  source 1..20: mol_type = other DNA
ttctatggtttggtcctgtg

SEQ ID NO: 4980 - DNA, 20 bp, synthetic construct
  source 1..20: mol_type = other DNA
ctccttacgagcaggtacaa

SEQ ID NO: 4981 - DNA, 20 bp, synthetic construct
  source 1..20: mol_type = other DNA
gggtgttgtacaccttctcc

SEQ ID NO: 4982 - DNA, 20 bp, synthetic construct
  source 1..20: mol_type = other DNA
ggctgcacggtcaccaggtt

SEQ ID NO: 4983 - DNA, 20 bp, synthetic construct
  source 1..20: mol_type = other DNA
aagctggcgcgcaagagacc

SEQ ID NO: 4984 - DNA, 20 bp, synthetic construct
  source 1..20: mol_type = other DNA
ctttgttcttggtctcagtg

SEQ ID NO: 4985 - DNA, 20 bp, synthetic construct
  source 1..20: mol_type = other DNA
ctcactgggtgccatcgtaa

SEQ ID NO: 4986 - DNA, 20 bp, synthetic construct
  source 1..20: mol_type = other DNA
agtagtagcagctgatttgg

SEQ ID NO: 4987 - DNA, 20 bp, synthetic construct
  source 1..20: mol_type = other DNA
tgacatatactccatgtagg

SEQ ID NO: 4988 - DNA, 20 bp, synthetic construct
  source 1..20: mol_type = other DNA
tgattataagccttgcttgc

SEQ ID NO: 4989 - DNA, 20 bp, synthetic construct
  source 1..20: mol_type = other DNA
gtttttggtcctttcaccca

SEQ ID NO: 4990 - DNA, 20 bp, synthetic construct
  source 1..20: mol_type = other DNA
ggacttaattctcctccgta

SEQ ID NO: 4991 - DNA, 20 bp, synthetic construct
  source 1..20: mol_type = other DNA
tgcaggtgttcttagtggaa

SEQ ID NO: 4992 - DNA, 20 bp, synthetic construct
  source 1..20: mol_type = other DNA
ttccttcacatctgctgaat

SEQ ID NO: 4993 - DNA, 20 bp, synthetic construct
  source 1..20: mol_type = other DNA
aggttttttttcctgttccc

SEQ ID NO: 4994 - DNA, 20 bp, synthetic construct
  source 1..20: mol_type = other DNA
tccggcctcacaagcccgag

SEQ ID NO: 4995 - DNA, 20 bp, synthetic construct
  source 1..20: mol_type = other DNA
gtgaccgacttggccacgtc

SEQ ID NO: 4996 - DNA, 20 bp, synthetic construct
  source 1..20: mol_type = other DNA
atcccaatgtagtaaggcag

SEQ ID NO: 4997 - DNA, 20 bp, synthetic construct
  source 1..20: mol_type = other DNA
acaataccaggcaggataag

SEQ ID NO: 4998 - DNA, 20 bp, synthetic construct
  source 1..20: mol_type = other DNA
aaaaaagggacgtcttaggg

SEQ ID NO: 4999 - DNA, 20 bp, synthetic construct
  source 1..20: mol_type = other DNA
gggcctggcagaatgtctgt

SEQ ID NO: 5000 - DNA, 20 bp, synthetic construct
  source 1..20: mol_type = other DNA
agcttgctcatgaagcaagg

SEQ ID NO: 5001 - DNA, 20 bp, synthetic construct
  source 1..20: mol_type = other DNA
gaccagacaagtgcatataa

SEQ ID NO: 5002 - DNA, 20 bp, synthetic construct
  source 1..20: mol_type = other DNA
tgatctgcaggttttccaaa

SEQ ID NO: 5003 - DNA, 20 bp, synthetic construct
  source 1..20: mol_type = other DNA
ttttggttttctgaccggag

SEQ ID NO: 5004 - DNA, 20 bp, synthetic construct
  source 1..20: mol_type = other DNA
ccttacacgcttgcttgctc

SEQ ID NO: 5005 - DNA, 20 bp, synthetic construct
  source 1..20: mol_type = other DNA
cttcgacacaaatgtacatc

SEQ ID NO: 5006 - DNA, 20 bp, synthetic construct
  source 1..20: mol_type = other DNA
tctcgctagacacggttcgg

SEQ ID NO: 5007 - DNA, 20 bp, synthetic construct
  source 1..20: mol_type = other DNA
gatgttagcgttcagtcgag

SEQ ID NO: 5008 - DNA, 20 bp, synthetic construct
  source 1..20: mol_type = other DNA
caacgactacgtacgtagca

SEQ ID NO: 5009 - DNA, 20 bp, synthetic construct
  source 1..20: mol_type = other DNA
gtcccaattttcgctaaccc

SEQ ID NO: 5010 - DNA, 20 bp, synthetic construct
  source 1..20: mol_type = other DNA
cctgcagcgtaattaataag

SEQ ID NO: 5011 - DNA, 20 bp, synthetic construct
  source 1..20: mol_type = other DNA
agttggtaccaccactagaa

SEQ ID NO: 5012 - DNA, 20 bp, synthetic construct
  source 1..20: mol_type = other DNA
ccggcagttgctccattaaa

SEQ ID NO: 5013 - DNA, 20 bp, synthetic construct
  source 1..20: mol_type = other DNA
cctgctaacctgcatcagcc

SEQ ID NO: 5014 - DNA, 20 bp, synthetic construct
  source 1..20: mol_type = other DNA
tctggttttgggtagctgtt

SEQ ID NO: 5015 - DNA, 20 bp, synthetic construct
  source 1..20: mol_type = other DNA
ccaatggtctaagacaggta

SEQ ID NO: 5016 - DNA, 20 bp, synthetic construct
  source 1..20: mol_type = other DNA
ctaccggccttcggagctca

SEQ ID NO: 5017 - DNA, 20 bp, synthetic construct
  source 1..20: mol_type = other DNA
ctgcacagcacgttccaggg

SEQ ID NO: 5018 - DNA, 20 bp, synthetic construct
  source 1..20: mol_type = other DNA
tccttcccggcttccataag

SEQ ID NO: 5019 - DNA, 20 bp, synthetic construct
  source 1..20: mol_type = other DNA
gtctggctccggtaagtaag

SEQ ID NO: 5020 - DNA, 20 bp, synthetic construct
  source 1..20: mol_type = other DNA
cactgctcctacttatgtat

SEQ ID NO: 5021 - DNA, 20 bp, synthetic construct
  source 1..20: mol_type = other DNA
agggcacccagtacttgttg

SEQ ID NO: 5022 - DNA, 20 bp, synthetic construct
  source 1..20: mol_type = other DNA
atcctcatgacaactcgagg

SEQ ID NO: 5023 - DNA, 20 bp, synthetic construct
  source 1..20: mol_type = other DNA
gtccacgccgtgcacgctag

SEQ ID NO: 5024 - DNA, 20 bp, synthetic construct
  source 1..20: mol_type = other DNA
ccgccactttgagagtgtat

SEQ ID NO: 5025 - DNA, 20 bp, synthetic construct
  source 1..20: mol_type = other DNA
ggccacgaggatcgaagtta

SEQ ID NO: 5026 - DNA, 20 bp, synthetic construct
  source 1..20: mol_type = other DNA
ttaatggaatccagcacatc

SEQ ID NO: 5027 - DNA, 20 bp, synthetic construct
  source 1..20: mol_type = other DNA
ccggaccatgtagagcgcat

SEQ ID NO: 5028 - DNA, 20 bp, synthetic construct
  source 1..20: mol_type = other DNA
gctggagatgatattgatgg

SEQ ID NO: 5029 - DNA, 20 bp, synthetic construct
  source 1..20: mol_type = other DNA
cttctcgtcgccgtagggca

SEQ ID NO: 5030 - DNA, 20 bp, synthetic construct
  source 1..20: mol_type = other DNA
tgttaccgccgttcttattc

SEQ ID NO: 5031 - DNA, 20 bp, synthetic construct
  source 1..20: mol_type = other DNA
tccaggttctgcaggttctt

SEQ ID NO: 5032 - DNA, 20 bp, synthetic construct
  source 1..20: mol_type = other DNA
aatcggaatccgtattccgc

SEQ ID NO: 5033 - DNA, 20 bp, synthetic construct
  source 1..20: mol_type = other DNA
tttcacccaagtctgttttg

SEQ ID NO: 5034 - DNA, 20 bp, synthetic construct
  source 1..20: mol_type = other DNA
ctggaaagaagtctctgtag

SEQ ID NO: 5035 - DNA, 20 bp, synthetic construct
  source 1..20: mol_type = other DNA
agttctctggcatcgacggg

SEQ ID NO: 5036 - DNA, 20 bp, synthetic construct
  source 1..20: mol_type = other DNA
gctccaagacaaggccatag

SEQ ID NO: 5037 - DNA, 20 bp, synthetic construct
  source 1..20: mol_type = other DNA
gtccttggcttgaatgatta

SEQ ID NO: 5038 - DNA, 20 bp, synthetic construct
  source 1..20: mol_type = other DNA
gaggatggtgtaagcgatgg

SEQ ID NO: 5039 - DNA, 20 bp, synthetic construct
  source 1..20: mol_type = other DNA
tagctatgattagggctgtg

SEQ ID NO: 5040 - DNA, 20 bp, synthetic construct
  source 1..20: mol_type = other DNA
gttggctctggcatttatag

SEQ ID NO: 5041 - DNA, 20 bp, synthetic construct
  source 1..20: mol_type = other DNA
gtccaggaggtagctcacgt

SEQ ID NO: 5042 - DNA, 20 bp, synthetic construct
  source 1..20: mol_type = other DNA
acaaggctttggagaaatag

SEQ ID NO: 5043 - DNA, 20 bp, synthetic construct
  source 1..20: mol_type = other DNA
tgatagtgtccctgtagggt

SEQ ID NO: 5044 - DNA, 20 bp, synthetic construct
  source 1..20: mol_type = other DNA
gtgatgctcttgactatgga

SEQ ID NO: 5045 - DNA, 20 bp, synthetic construct
  source 1..20: mol_type = other DNA
gcagcagcagctcaacataa

SEQ ID NO: 5046 - DNA, 20 bp, synthetic construct
  source 1..20: mol_type = other DNA
tcagctttcaccaaaaggtc

SEQ ID NO: 5047 - DNA, 20 bp, synthetic construct
  source 1..20: mol_type = other DNA
gatgatcactggcaaataga

SEQ ID NO: 5048 - DNA, 20 bp, synthetic construct
  source 1..20: mol_type = other DNA
cagtaaccaatcacagtgta

SEQ ID NO: 5049 - DNA, 20 bp, synthetic construct
  source 1..20: mol_type = other DNA
accactttgtttgacctcgt

SEQ ID NO: 5050 - DNA, 20 bp, synthetic construct
  source 1..20: mol_type = other DNA
tctcaatccagccaggtatg

SEQ ID NO: 5051 - DNA, 20 bp, synthetic construct
  source 1..20: mol_type = other DNA
agtggaggccgtaattttag

SEQ ID NO: 5052 - DNA, 20 bp, synthetic construct
  source 1..20: mol_type = other DNA
ttgacttagcacggtagaaa

SEQ ID NO: 5053 - DNA, 20 bp, synthetic construct
  source 1..20: mol_type = other DNA
tcacgatgttgtcgccggca

SEQ ID NO: 5054 - DNA, 20 bp, synthetic construct
  source 1..20: mol_type = other DNA
caagaagaaatatcgcaccc

SEQ ID NO: 5055 - DNA, 20 bp, synthetic construct
  source 1..20: mol_type = other DNA
ggagtagacgaccttggtgg

SEQ ID NO: 5056 - DNA, 20 bp, synthetic construct
  source 1..20: mol_type = other DNA
cgggcagcagaatacttggc

SEQ ID NO: 5057 - DNA, 20 bp, synthetic construct
  source 1..20: mol_type = other DNA
catggaggccattgttcagc

SEQ ID NO: 5058 - DNA, 20 bp, synthetic construct
  source 1..20: mol_type = other DNA
tggagacttctacagggacc

SEQ ID NO: 5059 - DNA, 20 bp, synthetic construct
  source 1..20: mol_type = other DNA
aggaaggacaattcccttcg

SEQ ID NO: 5060 - DNA, 20 bp, synthetic construct
  source 1..20: mol_type = other DNA
agccgagtttctgttgactc

SEQ ID NO: 5061 - DNA, 20 bp, synthetic construct
  source 1..20: mol_type = other DNA
acctgaggttcaaatgtgtc

SEQ ID NO: 5062 - DNA, 20 bp, synthetic construct
  source 1..20: mol_type = other DNA
tcgagaagctctgtcacttg

SEQ ID NO: 5063 - DNA, 20 bp, synthetic construct
  source 1..20: mol_type = other DNA
tgggagtacgagtggattgt

SEQ ID NO: 5064 - DNA, 20 bp, synthetic construct
  source 1..20: mol_type = other DNA
tggtcatcctcagtctgaac

SEQ ID NO: 5065 - DNA, 20 bp, synthetic construct
  source 1..20: mol_type = other DNA
gccatccgaactaatttcac

SEQ ID NO: 5066 - DNA, 20 bp, synthetic construct
  source 1..20: mol_type = other DNA
tggtcagctcaactgaaagc

SEQ ID NO: 5067 - DNA, 20 bp, synthetic construct
  source 1..20: mol_type = other DNA
cagcccgaaggacagtacgc

SEQ ID NO: 5068 - DNA, 20 bp, synthetic construct
  source 1..20: mol_type = other DNA
gggaaggcttaaacgcagct

SEQ ID NO: 5069 - DNA, 20 bp, synthetic construct
  source 1..20: mol_type = other DNA
acatcaatgcacttggtgat

SEQ ID NO: 5070 - DNA, 20 bp, synthetic construct
  source 1..20: mol_type = other DNA
attcactggtgacatgtttg

SEQ ID NO: 5071 - DNA, 20 bp, synthetic construct
  source 1..20: mol_type = other DNA
acttggtagctgatccagtc

SEQ ID NO: 5072 - DNA, 20 bp, synthetic construct
  source 1..20: mol_type = other DNA
tccctgccggagttgccaga

SEQ ID NO: 5073 - DNA, 20 bp, synthetic construct
  source 1..20: mol_type = other DNA
ccttaaagagcccgctctca

SEQ ID NO: 5074 - DNA, 20 bp, synthetic construct
  source 1..20: mol_type = other DNA
tgagacttccttttaaccgg

SEQ ID NO: 5075 - DNA, 20 bp, synthetic construct
  source 1..20: mol_type = other DNA
gccaatcaccaactgtcgtg

SEQ ID NO: 5076 - DNA, 20 bp, synthetic construct
  source 1..20: mol_type = other DNA
catccaaaagtccaagagtc

SEQ ID NO: 5077 - DNA, 20 bp, synthetic construct
  source 1..20: mol_type = other DNA
tgccggagaaactcatggtg

SEQ ID NO: 5078 - DNA, 20 bp, synthetic construct
  source 1..20: mol_type = other DNA
attgagtacctactatgcac

SEQ ID NO: 5079 - DNA, 20 bp, synthetic construct
  source 1..20: mol_type = other DNA
caacaacctgatctctgcaa

SEQ ID NO: 5080 - DNA, 20 bp, synthetic construct
  source 1..20: mol_type = other DNA
ctactataaggacgaagcct

SEQ ID NO: 5081 - DNA, 20 bp, synthetic construct
  source 1..20: mol_type = other DNA
tggcgtctccgctgtagtgt

SEQ ID NO: 5082 - DNA, 20 bp, synthetic construct
  source 1..20: mol_type = other DNA
cattcctcttgtgaagacgt

SEQ ID NO: 5083 - DNA, 20 bp, synthetic construct
  source 1..20: mol_type = other DNA
gatgcgccctttttgtaggg

SEQ ID NO: 5084 - DNA, 20 bp, synthetic construct
  source 1..20: mol_type = other DNA
tccatatccactccaatcaa

SEQ ID NO: 5085 - DNA, 20 bp, synthetic construct
  source 1..20: mol_type = other DNA
tcactgtgcagtgctttgag

SEQ ID NO: 5086 - DNA, 20 bp, synthetic construct
  source 1..20: mol_type = other DNA
gggcctgcttgatgctaatg

SEQ ID NO: 5087 - DNA, 20 bp, synthetic construct
  source 1..20: mol_type = other DNA
ctgagtccgtttatttggcg

SEQ ID NO: 5088 - DNA, 20 bp, synthetic construct
  source 1..20: mol_type = other DNA
aatttgcaggacacaccgag

SEQ ID NO: 5089 - DNA, 20 bp, synthetic construct
  source 1..20: mol_type = other DNA
gccgcctgtgagatcgctcc

SEQ ID NO: 5090 - DNA, 20 bp, synthetic construct
  source 1..20: mol_type = other DNA
tgttgaaaagcagatctccc

SEQ ID NO: 5091 - DNA, 20 bp, synthetic construct
  source 1..20: mol_type = other DNA
aggccagtgaatgctccctt

SEQ ID NO: 5092 - DNA, 20 bp, synthetic construct
  source 1..20: mol_type = other DNA
gagatgactgaacagatgaa

SEQ ID NO: 5093 - DNA, 20 bp, synthetic construct
  source 1..20: mol_type = other DNA
gattttcttcaggacaggtg

SEQ ID NO: 5094 - DNA, 20 bp, synthetic construct
  source 1..20: mol_type = other DNA
tgatagtaaccaggcgtctc

SEQ ID NO: 5095 - DNA, 20 bp, synthetic construct
  source 1..20: mol_type = other DNA
gggaatttgctttggaaagg

SEQ ID NO: 5096 - DNA, 20 bp, synthetic construct
  source 1..20: mol_type = other DNA
gttcatttgcgacttcgttc

SEQ ID NO: 5097 - DNA, 20 bp, synthetic construct
  source 1..20: mol_type = other DNA
ggctgaataagatgattagg

SEQ ID NO: 5098 - DNA, 20 bp, synthetic construct
  source 1..20: mol_type = other DNA
cagctcttggtagtagtcgg

SEQ ID NO: 5099 - DNA, 20 bp, synthetic construct
  source 1..20: mol_type = other DNA
ccctggcagaggtgccgttg

SEQ ID NO: 5100 - DNA, 20 bp, synthetic construct
  source 1..20: mol_type = other DNA
gtggaaggtgtacgtcttcc

SEQ ID NO: 5101 - DNA, 20 bp, synthetic construct
  source 1..20: mol_type = other DNA
caatgattcatgaggacggt

SEQ ID NO: 5102 - DNA, 20 bp, synthetic construct
  source 1..20: mol_type = other DNA
ctggtgcagtcggatgaaca

SEQ ID NO: 5103 - DNA, 20 bp, synthetic construct
  source 1..20: mol_type = other DNA
ctggaagacttggccattga

SEQ ID NO: 5104 - DNA, 20 bp, synthetic construct
  source 1..20: mol_type = other DNA
cgcgtctcgaagtcgtcctt

SEQ ID NO: 5105 - DNA, 20 bp, synthetic construct
  source 1..20: mol_type = other DNA
ctcactgacaaactcgttgg

SEQ ID NO: 5106 - DNA, 20 bp, synthetic construct
  source 1..20: mol_type = other DNA
gcggacggttcgtgtttgaa

SEQ ID NO: 5107 - DNA, 20 bp, synthetic construct
  source 1..20: mol_type = other DNA
ggttgggataagcccttgca

SEQ ID NO: 5108 - DNA, 20 bp, synthetic construct
  source 1..20: mol_type = other DNA
cagcgacagacaggtccttt

SEQ ID NO: 5109 - DNA, 20 bp, synthetic construct
  source 1..20: mol_type = other DNA
ggagaagcagaaggaacaag

SEQ ID NO: 5110 - DNA, 20 bp, synthetic construct
  source 1..20: mol_type = other DNA
cttttccgcgagtccggcgg

SEQ ID NO: 5111 - DNA, 20 bp, synthetic construct
  source 1..20: mol_type = other DNA
gctggtgttccagtaatggt

SEQ ID NO: 5112 - DNA, 20 bp, synthetic construct
  source 1..20: mol_type = other DNA
agtagcatgcatacaagctg

SEQ ID NO: 5113 - DNA, 20 bp, synthetic construct
  source 1..20: mol_type = other DNA
tcccggtagcagcaagggtc

SEQ ID NO: 5114 - DNA, 20 bp, synthetic construct
  source 1..20: mol_type = other DNA
cgcccatgttttcaaagagc

SEQ ID NO: 5115 - DNA, 20 bp, synthetic construct
  source 1..20: mol_type = other DNA
agatctctagtgtggtagaa

SEQ ID NO: 5116 - DNA, 20 bp, synthetic construct
  source 1..20: mol_type = other DNA
ggtcccacggtcatccacgg

SEQ ID NO: 5117 - DNA, 20 bp, synthetic construct
  source 1..20: mol_type = other DNA
ggagcttgcaactgcagtag

SEQ ID NO: 5118 - DNA, 20 bp, synthetic construct
  source 1..20: mol_type = other DNA
caggcgaacatagtcgggtt

SEQ ID NO: 5119 - DNA, 20 bp, synthetic construct
  source 1..20: mol_type = other DNA
gcaccagcaatattccaccc

SEQ ID NO: 5120 - DNA, 20 bp, synthetic construct
  source 1..20: mol_type = other DNA
ccgccttaaagacgtagcac

SEQ ID NO: 5121 - DNA, 20 bp, synthetic construct
  source 1..20: mol_type = other DNA
ggctttatttacaatgccga

SEQ ID NO: 5122 - DNA, 20 bp, synthetic construct
  source 1..20: mol_type = other DNA
tcgtacacctactagaaagt

SEQ ID NO: 5123 - DNA, 20 bp, synthetic construct
  source 1..20: mol_type = other DNA
gatggaatagtgtctgcgct

SEQ ID NO: 5124 - DNA, 20 bp, synthetic construct
  source 1..20: mol_type = other DNA
ggctctgtggtataaagtgc

SEQ ID NO: 5125 - DNA, 20 bp, synthetic construct
  source 1..20: mol_type = other DNA
tacagagggtgtgagtgacc

SEQ ID NO: 5126 - DNA, 20 bp, synthetic construct
  source 1..20: mol_type = other DNA
aacaaaacccacatggtagc

SEQ ID NO: 5127 - DNA, 20 bp, synthetic construct
  source 1..20: mol_type = other DNA
ctgagagtgctgcgagcatc

SEQ ID NO: 5128 - DNA, 20 bp, synthetic construct
  source 1..20: mol_type = other DNA
agggcaccagcaggcgttgc

SEQ ID NO: 5129 - DNA, 20 bp, synthetic construct
  source 1..20: mol_type = other DNA
gatcctccaaacatgaggta

SEQ ID NO: 5130 - DNA, 20 bp, synthetic construct
  source 1..20: mol_type = other DNA
tccgaatccattcgacgata

SEQ ID NO: 5131 - DNA, 20 bp, synthetic construct
  source 1..20: mol_type = other DNA
ctgtcatggtgcatcagcat

SEQ ID NO: 5132 - DNA, 20 bp, synthetic construct
  source 1..20: mol_type = other DNA
cgggttccaagcacccacac

SEQ ID NO: 5133 - DNA, 20 bp, synthetic construct
  source 1..20: mol_type = other DNA
gcaggatgtgtggtaacggg

SEQ ID NO: 5134 - DNA, 20 bp, synthetic construct
  source 1..20: mol_type = other DNA
atccacatcatagttgcgga

SEQ ID NO: 5135 - DNA, 20 bp, synthetic construct
  source 1..20: mol_type = other DNA
ttgaggtcaggctcacacag

SEQ ID NO: 5136 - DNA, 20 bp, synthetic construct
  source 1..20: mol_type = other DNA
tgttcccacccatggacttg

SEQ ID NO: 5137 - DNA, 20 bp, synthetic construct
  source 1..20: mol_type = other DNA
agtagtgatgtaaactcagg

SEQ ID NO: 5138 - DNA, 20 bp, synthetic construct
  source 1..20: mol_type = other DNA
ttacagggacaccgattaca

SEQ ID NO: 5139 - DNA, 20 bp, synthetic construct
  source 1..20: mol_type = other DNA
caggttgccacggcaggctt

SEQ ID NO: 5140 - DNA, 20 bp, synthetic construct
  source 1..20: mol_type = other DNA
gacaattcatggtgtggcta

SEQ ID NO: 5141 - DNA, 20 bp, synthetic construct
  source 1..20: mol_type = other DNA
gacaatgccagaataagaca

SEQ ID NO: 5142 - DNA, 20 bp, synthetic construct
  source 1..20: mol_type = other DNA
gtgctgagctagaagtactt

SEQ ID NO: 5143 - DNA, 20 bp, synthetic construct
  source 1..20: mol_type = other DNA
gcagatcgaaacagatcggg

SEQ ID NO: 5144 - DNA, 20 bp, synthetic construct
  source 1..20: mol_type = other DNA
ttgtgacaggcagacgtgat

SEQ ID NO: 5145 - DNA, 20 bp, synthetic construct
  source 1..20: mol_type = other DNA
tccatccttgttcacgtcgc

SEQ ID NO: 5146 - DNA, 20 bp, synthetic construct
  source 1..20: mol_type = other DNA
ccctggctggcgcaatcttt

SEQ ID NO: 5147 - DNA, 20 bp, synthetic construct
  source 1..20: mol_type = other DNA
attggctttgtgttggctac

SEQ ID NO: 5148 - DNA, 20 bp, synthetic construct
  source 1..20: mol_type = other DNA
agccaacattatggaggata

SEQ ID NO: 5149 - DNA, 20 bp, synthetic construct
  source 1..20: mol_type = other DNA
ccacagtgtcaacctgagtg

SEQ ID NO: 5150 - DNA, 20 bp, synthetic construct
  source 1..20: mol_type = other DNA
ggagctgatgtaaggagtcc

SEQ ID NO: 5151 - DNA, 20 bp, synthetic construct
  source 1..20: mol_type = other DNA
ggtgttgtaatacagtccca

SEQ ID NO: 5152 - DNA, 20 bp, synthetic construct
  source 1..20: mol_type = other DNA
gccaagttttctcagaatcg

SEQ ID NO: 5153 - DNA, 20 bp, synthetic construct
  source 1..20: mol_type = other DNA
ggctttctgtggcgcagcca

SEQ ID NO: 5154 - DNA, 20 bp, synthetic construct
  source 1..20: mol_type = other DNA
cagggttggttttcacgaat

SEQ ID NO: 5155 - DNA, 20 bp, synthetic construct
  source 1..20: mol_type = other DNA
ggcacgttgaaattcacaac

SEQ ID NO: 5156 - DNA, 20 bp, synthetic construct
  source 1..20: mol_type = other DNA
ccgggcttgctcctgggtat

SEQ ID NO: 5157 - DNA, 20 bp, synthetic construct
  source 1..20: mol_type = other DNA
gcatcattctccgtctggtt

SEQ ID NO: 5158 - DNA, 20 bp, synthetic construct
  source 1..20: mol_type = other DNA
tgcagttgagctcatcgctg

SEQ ID NO: 5159 - DNA, 20 bp, synthetic construct
  source 1..20: mol_type = other DNA
ttgatgacgcggatctcacc

SEQ ID NO: 5160 - DNA, 20 bp, synthetic construct
  source 1..20: mol_type = other DNA
attggttaaagagctcgggc

SEQ ID NO: 5161 - DNA, 20 bp, synthetic construct
  source 1..20: mol_type = other DNA
ttccttgccaaacaggtcgc

SEQ ID NO: 5162 - DNA, 20 bp, synthetic construct
  source 1..20: mol_type = other DNA
gccagtattgagcagcattc

SEQ ID NO: 5163 - DNA, 20 bp, synthetic construct
  source 1..20: mol_type = other DNA
cagatgtgtttgtgggactc

SEQ ID NO: 5164 - DNA, 20 bp, synthetic construct
  source 1..20: mol_type = other DNA
acgcagcagaaataaagcac

SEQ ID NO: 5165 - DNA, 20 bp, synthetic construct
  source 1..20: mol_type = other DNA
acaacatgcaatcgtgttgc

SEQ ID NO: 5166 - DNA, 20 bp, synthetic construct
  source 1..20: mol_type = other DNA
tctggtccacattgtagacg

SEQ ID NO: 5167 - DNA, 20 bp, synthetic construct
  source 1..20: mol_type = other DNA
cagcctttctggagtataca

SEQ ID NO: 5168 - DNA, 20 bp, synthetic construct
  source 1..20: mol_type = other DNA
tcggcaaggcaatgtattaa

SEQ ID NO: 5169 - DNA, 20 bp, synthetic construct
  source 1..20: mol_type = other DNA
gttccacaccatcttcttga

SEQ ID NO: 5170 - DNA, 20 bp, synthetic construct
  source 1..20: mol_type = other DNA
catccaacttgtccttcaaa

SEQ ID NO: 5171 - DNA, 20 bp, synthetic construct
  source 1..20: mol_type = other DNA
ggtgataagtaaccagccac

SEQ ID NO: 5172 - DNA, 20 bp, synthetic construct
  source 1..20: mol_type = other DNA
ccagtttttgaacagcctcc

SEQ ID NO: 5173 - DNA, 20 bp, synthetic construct
  source 1..20: mol_type = other DNA
ttggcatggtctctgcttat

SEQ ID NO: 5174 - DNA, 20 bp, synthetic construct
  source 1..20: mol_type = other DNA
gagagagttgggatgtttgt

SEQ ID NO: 5175 - DNA, 20 bp, synthetic construct
  source 1..20: mol_type = other DNA
gaccacagcggttattatgt

SEQ ID NO: 5176 - DNA, 20 bp, synthetic construct
  source 1..20: mol_type = other DNA
aagtagacaagatcagtccg

SEQ ID NO: 5177 - DNA, 20 bp, synthetic construct
  source 1..20: mol_type = other DNA
gctctcttgagatcttactg

SEQ ID NO: 5178 - DNA, 20 bp, synthetic construct
  source 1..20: mol_type = other DNA
ccgtggcatttgcaggctac

SEQ ID NO: 5179 - DNA, 20 bp, synthetic construct
  source 1..20: mol_type = other DNA
ggtactgtttttgactgttc

SEQ ID NO: 5180 - DNA, 20 bp, synthetic construct
  source 1..20: mol_type = other DNA
atttccatctgtgtgcaact

SEQ ID NO: 5181 - DNA, 20 bp, synthetic construct
  source 1..20: mol_type = other DNA
gtgaggccggtgcagaagcg

SEQ ID NO: 5182 - DNA, 20 bp, synthetic construct
  source 1..20: mol_type = other DNA
gacgtgaactggaagattcc

SEQ ID NO: 5183 - DNA, 20 bp, synthetic construct
  source 1..20: mol_type = other DNA
aggcttgaaaggtggctcgt

SEQ ID NO: 5184 - DNA, 20 bp, synthetic construct
  source 1..20: mol_type = other DNA
tcgacttgtacagacgttca

SEQ ID NO: 5185 - DNA, 20 bp, synthetic construct
  source 1..20: mol_type = other DNA
cttcatggcagcacgaagtt

SEQ ID NO: 5186 - DNA, 20 bp, synthetic construct
  source 1..20: mol_type = other DNA
ggctcaccgctgatccggga

SEQ ID NO: 5187 - DNA, 20 bp, synthetic construct
  source 1..20: mol_type = other DNA
gccaggaaatatcagtgtcc

SEQ ID NO: 5188 - DNA, 20 bp, synthetic construct
  source 1..20: mol_type = other DNA
ctgttcagtttgccttatct

SEQ ID NO: 5189 - DNA, 20 bp, synthetic construct
  source 1..20: mol_type = other DNA
agtgaatcctccatagtgag

SEQ ID NO: 5190 - DNA, 20 bp, synthetic construct
  source 1..20: mol_type = other DNA
aaggacacttgaactccctg

SEQ ID NO: 5191 - DNA, 20 bp, synthetic construct
  source 1..20: mol_type = other DNA
catggagcataagaaaaagc

SEQ ID NO: 5192 - DNA, 20 bp, synthetic construct
  source 1..20: mol_type = other DNA
ctctgctggtctcaaccttc

SEQ ID NO: 5193 - DNA, 20 bp, synthetic construct
  source 1..20: mol_type = other DNA
aggttgagggctgctcacct

SEQ ID NO: 5194 - DNA, 20 bp, synthetic construct
  source 1..20: mol_type = other DNA
cagaaaagacattgacgttg

SEQ ID NO: 5195 - DNA, 20 bp, synthetic construct
  source 1..20: mol_type = other DNA
gccagggaatgacccaaaaa

SEQ ID NO: 5196 - DNA, 20 bp, synthetic construct
  source 1..20: mol_type = other DNA
gagcccaagttgaatcacca

SEQ ID NO: 5197 - DNA, 20 bp, synthetic construct
  source 1..20: mol_type = other DNA
acacacactatgtgtttgga

SEQ ID NO: 5198 - DNA, 20 bp, synthetic construct
  source 1..20: mol_type = other DNA
agtccctaaactctctcatc

SEQ ID NO: 5199 - DNA, 20 bp, synthetic construct
  source 1..20: mol_type = other DNA
ccacttttatggcacgtcac

SEQ ID NO: 5200 - DNA, 20 bp, synthetic construct
  source 1..20: mol_type = other DNA
ttcctttgaagcctacacag

SEQ ID NO: 5201 - DNA, 20 bp, synthetic construct
  source 1..20: mol_type = other DNA
tggcctttgttcaggtacgt

SEQ ID NO: 5202 - DNA, 20 bp, synthetic construct
  source 1..20: mol_type = other DNA
ctttgctttcgttcttcatc

SEQ ID NO: 5203 - DNA, 20 bp, synthetic construct
  source 1..20: mol_type = other DNA
cagggtaggttgagctgctg

SEQ ID NO: 5204 - DNA, 20 bp, synthetic construct
  source 1..20: mol_type = other DNA
ttgaccttcgagtgctgatc

SEQ ID NO: 5205 - DNA, 20 bp, synthetic construct
  source 1..20: mol_type = other DNA
ggcaacgatgacgttggttc

SEQ ID NO: 5206 - DNA, 20 bp, synthetic construct
  source 1..20: mol_type = other DNA
tttcagatttctttggtgcg

SEQ ID NO: 5207 - DNA, 20 bp, synthetic construct
  source 1..20: mol_type = other DNA
tctggcgctccaagacgttg

SEQ ID NO: 5208 - DNA, 20 bp, synthetic construct
  source 1..20: mol_type = other DNA
agactcagccaaggttgtga

SEQ ID NO: 5209 - DNA, 20 bp, synthetic construct
  source 1..20: mol_type = other DNA
aatgcacagcatgactacct

SEQ ID NO: 5210 - DNA, 20 bp, synthetic construct
  source 1..20: mol_type = other DNA
gggtcatcaagcagtaacgg

SEQ ID NO: 5211 - DNA, 20 bp, synthetic construct
  source 1..20: mol_type = other DNA
gtcttcacggatactcagaa

SEQ ID NO: 5212 - DNA, 20 bp, synthetic construct
  source 1..20: mol_type = other DNA
gtagcgctgcacgatcttcc

SEQ ID NO: 5213 - DNA, 20 bp, synthetic construct
  source 1..20: mol_type = other DNA
ccatcgttgatggcttgacg

SEQ ID NO: 5214 - DNA, 20 bp, synthetic construct
  source 1..20: mol_type = other DNA
agcttttgcttgcgtttgtt

SEQ ID NO: 5215 - DNA, 20 bp, synthetic construct
  source 1..20: mol_type = other DNA
cagatcgctggacattagta

SEQ ID NO: 5216 - DNA, 20 bp, synthetic construct
  source 1..20: mol_type = other DNA
tctccaaggtaattccttgc

SEQ ID NO: 5217 - DNA, 20 bp, synthetic construct
  source 1..20: mol_type = other DNA
acaaggtgacactgttctta

SEQ ID NO: 5218 - DNA, 20 bp, synthetic construct
  source 1..20: mol_type = other DNA
gtagtgaagtcaatgctact

SEQ ID NO: 5219 - DNA, 20 bp, synthetic construct
  source 1..20: mol_type = other DNA
ggtggttgtagtaatctcta

SEQ ID NO: 5220 - DNA, 20 bp, synthetic construct
  source 1..20: mol_type = other DNA
acaccatgggcaccagtgtc

SEQ ID NO: 5221 - DNA, 20 bp, synthetic construct
  source 1..20: mol_type = other DNA
gtagaacttgggatacgatg

SEQ ID NO: 5222 - DNA, 20 bp, synthetic construct
  source 1..20: mol_type = other DNA
ccctcagaaccttttagaga

SEQ ID NO: 5223 - DNA, 20 bp, synthetic construct
  source 1..20: mol_type = other DNA
ctgacgcacacctattgcaa

SEQ ID NO: 5224 - DNA, 20 bp, synthetic construct
  source 1..20: mol_type = other DNA
tacctagaatgtggctgatt

SEQ ID NO: 5225 - DNA, 20 bp, synthetic construct
  source 1..20: mol_type = other DNA
gaggccaccagaaaataaac

SEQ ID NO: 5226 - DNA, 20 bp, synthetic construct
  source 1..20: mol_type = other DNA
ggtactcaaggagacaatgg

SEQ ID NO: 5227 - DNA, 20 bp, synthetic construct
  source 1..20: mol_type = other DNA
ctccaaagagaacatgtacc

SEQ ID NO: 5228 - DNA, 20 bp, synthetic construct
  source 1..20: mol_type = other DNA
gctgcttattttgccggctg

SEQ ID NO: 5229 - DNA, 20 bp, synthetic construct
  source 1..20: mol_type = other DNA
ggcttccacatcagttaact

SEQ ID NO: 5230 - DNA, 20 bp, synthetic construct
  source 1..20: mol_type = other DNA
tccaaagagaaatctcacga

SEQ ID NO: 5231 - DNA, 20 bp, synthetic construct
  source 1..20: mol_type = other DNA
atatggagctaagttagctc

SEQ ID NO: 5232 - DNA, 20 bp, synthetic construct
  source 1..20: mol_type = other DNA
taggcctggccaaatcattg

SEQ ID NO: 5233 - DNA, 20 bp, synthetic construct
  source 1..20: mol_type = other DNA
gccctgatatagggacgatt

SEQ ID NO: 5234 - DNA, 20 bp, synthetic construct
  source 1..20: mol_type = other DNA
gctcgagggcttttcctgcc

SEQ ID NO: 5235 - DNA, 20 bp, synthetic construct
  source 1..20: mol_type = other DNA
gctcagtttcttcttcaatc

SEQ ID NO: 5236 - DNA, 20 bp, synthetic construct
  source 1..20: mol_type = other DNA
gataaaacagaccaactgtg

SEQ ID NO: 5237 - DNA, 20 bp, synthetic construct
  source 1..20: mol_type = other DNA
ggtcatagcgccggccaaag

SEQ ID NO: 5238 - DNA, 20 bp, synthetic construct
  source 1..20: mol_type = other DNA
tgggtaggtagcgaagaata

SEQ ID NO: 5239 - DNA, 20 bp, synthetic construct
  source 1..20: mol_type = other DNA
gtaggactggatctggtgtc

SEQ ID NO: 5240 - DNA, 20 bp, synthetic construct
  source 1..20: mol_type = other DNA
tcaccactccttttggcttt

SEQ ID NO: 5241 - DNA, 20 bp, synthetic construct
  source 1..20: mol_type = other DNA
aggccttgcttgcggacgcc

SEQ ID NO: 5242 - DNA, 20 bp, synthetic construct
  source 1..20: mol_type = other DNA
gaggaggaaagatagcgcca

SEQ ID NO: 5243 - DNA, 20 bp, synthetic construct
  source 1..20: mol_type = other DNA
ttcctcattacgggagaccc

SEQ ID NO: 5244 - DNA, 20 bp, synthetic construct
  source 1..20: mol_type = other DNA
tgttggctgtgtgttgaaca

SEQ ID NO: 5245 - DNA, 20 bp, synthetic construct
  source 1..20: mol_type = other DNA
tccttagatggcaagtaaca

SEQ ID NO: 5246 - DNA, 20 bp, synthetic construct
  source 1..20: mol_type = other DNA
tttggattccgtagcatatg

SEQ ID NO: 5247 - DNA, 20 bp, synthetic construct
  source 1..20: mol_type = other DNA
gacaaggaaaacccttctgg

SEQ ID NO: 5248 - DNA, 20 bp, synthetic construct
  source 1..20: mol_type = other DNA
ccacctcatagccttcattg

SEQ ID NO: 5249 - DNA, 20 bp, synthetic construct
  source 1..20: mol_type = other DNA
caccaagcaggttgatgatg

SEQ ID NO: 5250 - DNA, 20 bp, synthetic construct
  source 1..20: mol_type = other DNA
tgaacgccatgccatgggag

SEQ ID NO: 5251 - DNA, 20 bp, synthetic construct
  source 1..20: mol_type = other DNA
actatcacttcctctaaggg

SEQ ID NO: 5252 - DNA, 20 bp, synthetic construct
  source 1..20: mol_type = other DNA
ggcaccgcggtagtacaggc

SEQ ID NO: 5253 - DNA, 20 bp, synthetic construct
  source 1..20: mol_type = other DNA
tttcaggcgattacaagggc

SEQ ID NO: 5254 - DNA, 20 bp, synthetic construct
  source 1..20: mol_type = other DNA
agtttggaagcgactgtagg

SEQ ID NO: 5255 - DNA, 20 bp, synthetic construct
  source 1..20: mol_type = other DNA
cagacggactttctgcggcg

SEQ ID NO: 5256 - DNA, 20 bp, synthetic construct
  source 1..20: mol_type = other DNA
tctggtgtagtataatcagg

SEQ ID NO: 5257 - DNA, 20 bp, synthetic construct
  source 1..20: mol_type = other DNA
ccattattggccttagatcc

SEQ ID NO: 5258 - DNA, 20 bp, synthetic construct
  source 1..20: mol_type = other DNA
ggtctggaaagcgtcaatta

SEQ ID NO: 5259 - DNA, 20 bp, synthetic construct
  source 1..20: mol_type = other DNA
ggcatcatatagttcttgag

SEQ ID NO: 5260 - DNA, 20 bp, synthetic construct
  source 1..20: mol_type = other DNA
ctccatccagttgataaacc

SEQ ID NO: 5261 - DNA, 20 bp, synthetic construct
  source 1..20: mol_type = other DNA
tgggatgttctcactctcgg

SEQ ID NO: 5262 - DNA, 20 bp, synthetic construct
  source 1..20: mol_type = other DNA
cactatcagccagttcgttg

SEQ ID NO: 5263 - DNA, 20 bp, synthetic construct
  source 1..20: mol_type = other DNA
gtctggctatctgattgaag

SEQ ID NO: 5264 - DNA, 20 bp, synthetic construct
  source 1..20: mol_type = other DNA
attatactccgtgggccaac

SEQ ID NO: 5265 - DNA, 20 bp, synthetic construct
  source 1..20: mol_type = other DNA
gatcactacttaggcgcttt

SEQ ID NO: 5266 - DNA, 20 bp, synthetic construct
  source 1..20: mol_type = other DNA
ctccgtccctgcagttccta

SEQ ID NO: 5267 - DNA, 20 bp, synthetic construct
  source 1..20: mol_type = other DNA
cagtgaacctccgactgtat

SEQ ID NO: 5268 - DNA, 20 bp, synthetic construct
  source 1..20: mol_type = other DNA
gctgttgatattgagacaac

SEQ ID NO: 5269 - DNA, 20 bp, synthetic construct
  source 1..20: mol_type = other DNA
aggtttttccagtgttttcc

SEQ ID NO: 5270 - DNA, 20 bp, synthetic construct
  source 1..20: mol_type = other DNA
ttgagctcaacttccgggta

SEQ ID NO: 5271 - DNA, 20 bp, synthetic construct
  source 1..20: mol_type = other DNA
ttctagggaggagtaagtgt

SEQ ID NO: 5272 - DNA, 20 bp, synthetic construct
  source 1..20: mol_type = other DNA
tcttagttgacatttcggcc

SEQ ID NO: 5273 - DNA, 20 bp, synthetic construct
  source 1..20: mol_type = other DNA
ggagcaaaacaccaaagaag

SEQ ID NO: 5274 - DNA, 20 bp, synthetic construct
  source 1..20: mol_type = other DNA
atgacgtccaggtctaaata

SEQ ID NO: 5275 - DNA, 20 bp, synthetic construct
  source 1..20: mol_type = other DNA
cctccagctggcgcagcttc

SEQ ID NO: 5276 - DNA, 20 bp, synthetic construct
  source 1..20: mol_type = other DNA
agctccatttttcagggcaa

SEQ ID NO: 5277 - DNA, 20 bp, synthetic construct
  source 1..20: mol_type = other DNA
ttcccgccaattattatggt

SEQ ID NO: 5278 - DNA, 20 bp, synthetic construct
  source 1..20: mol_type = other DNA
gttcaggctgttactatgca

SEQ ID NO: 5279 - DNA, 20 bp, synthetic construct
  source 1..20: mol_type = other DNA
ttcatttggaaggatagagg

SEQ ID NO: 5280 - DNA, 20 bp, synthetic construct
  source 1..20: mol_type = other DNA
ctgtcctcaaagataccaga

SEQ ID NO: 5281 - DNA, 20 bp, synthetic construct
  source 1..20: mol_type = other DNA
aggacaccggctgtcactct

SEQ ID NO: 5282 - DNA, 20 bp, synthetic construct
  source 1..20: mol_type = other DNA
tgtgctggttcatcagcatc

SEQ ID NO: 5283 - DNA, 20 bp, synthetic construct
  source 1..20: mol_type = other DNA
ctgcagggtcaggttcttcc

SEQ ID NO: 5284 - DNA, 20 bp, synthetic construct
  source 1..20: mol_type = other DNA
caattgtgaagtgtattggg

SEQ ID NO: 5285 - DNA, 20 bp, synthetic construct
  source 1..20: mol_type = other DNA
tcgaaaggaatatctccaca

SEQ ID NO: 5286 - DNA, 20 bp, synthetic construct
  source 1..20: mol_type = other DNA
aaaaggaagaccagttcact

SEQ ID NO: 5287 - DNA, 20 bp, synthetic construct
  source 1..20: mol_type = other DNA
gctcgagtgttggcagcaaa

SEQ ID NO: 5288 - DNA, 20 bp, synthetic construct
  source 1..20: mol_type = other DNA
catacacaagagatggcacc

SEQ ID NO: 5289 - DNA, 20 bp, synthetic construct
  source 1..20: mol_type = other DNA
tctttttggtgcccaaaatc

SEQ ID NO: 5290 - DNA, 20 bp, synthetic construct
  source 1..20: mol_type = other DNA
ctctgttggtactacagctg

SEQ ID NO: 5291 - DNA, 20 bp, synthetic construct
  source 1..20: mol_type = other DNA
ttgatgcatgtttgcagaca

SEQ ID NO: 5292 - DNA, 20 bp, synthetic construct
  source 1..20: mol_type = other DNA
ggaggaaaacgccagtacaa

SEQ ID NO: 5293 - DNA, 20 bp, synthetic construct
  source 1..20: mol_type = other DNA
gattgtagcattgatctggc

SEQ ID NO: 5294 - DNA, 20 bp, synthetic construct
  source 1..20: mol_type = other DNA
agtctgggcttacatgacaa

SEQ ID NO: 5295 - DNA, 20 bp, synthetic construct
  source 1..20: mol_type = other DNA
aggaccatagggtaataagt

SEQ ID NO: 5296 - DNA, 20 bp, synthetic construct
  source 1..20: mol_type = other DNA
accgtttattgtcgttacac

SEQ ID NO: 5297 - DNA, 20 bp, synthetic construct
  source 1..20: mol_type = other DNA
cttcttcatgcggtacagca

SEQ ID NO: 5298 - DNA, 20 bp, synthetic construct
  source 1..20: mol_type = other DNA
cttcctcacaggtgaagttg

SEQ ID NO: 5299 - DNA, 20 bp, synthetic construct
  source 1..20: mol_type = other DNA
cctttgctgacaataagcac

SEQ ID NO: 5300 - DNA, 20 bp, synthetic construct
  source 1..20: mol_type = other DNA
cacagccacttaaggaacca

SEQ ID NO: 5301 - DNA, 20 bp, synthetic construct
  source 1..20: mol_type = other DNA
tcatcttctacactgcttag

SEQ ID NO: 5302 - DNA, 20 bp, synthetic construct
  source 1..20: mol_type = other DNA
agaatgtacaggtcaggatt

SEQ ID NO: 5303 - DNA, 20 bp, synthetic construct
  source 1..20: mol_type = other DNA
ggcagaggaagttggtaaaa

SEQ ID NO: 5304 - DNA, 20 bp, synthetic construct
  source 1..20: mol_type = other DNA
agggatccacatcttcaaat

SEQ ID NO: 5305 - DNA, 20 bp, synthetic construct
  source 1..20: mol_type = other DNA
ctggtaatataacctcgaca

SEQ ID NO: 5306 - DNA, 20 bp, synthetic construct
  source 1..20: mol_type = other DNA
cagaaactgacatgtcttgg

SEQ ID NO: 5307 - DNA, 20 bp, synthetic construct
  source 1..20: mol_type = other DNA
ggacacgaggacagattcca

SEQ ID NO: 5308 - DNA, 20 bp, synthetic construct
  source 1..20: mol_type = other DNA
ttcctatctggataggacac

SEQ ID NO: 5309 - DNA, 20 bp, synthetic construct
  source 1..20: mol_type = other DNA
aatcccgtacatgacgtcac

SEQ ID NO: 5310 - DNA, 20 bp, synthetic construct
  source 1..20: mol_type = other DNA
tcctaagcaccggatagttg

SEQ ID NO: 5311 - DNA, 20 bp, synthetic construct
  source 1..20: mol_type = other DNA
attgaagcagaaccaagttg

SEQ ID NO: 5312 - DNA, 20 bp, synthetic construct
  source 1..20: mol_type = other DNA
ctcgaatgtgcggacttttt

SEQ ID NO: 5313 - DNA, 20 bp, synthetic construct
  source 1..20: mol_type = other DNA
tgttttgtggagtgaatgtg

SEQ ID NO: 5314 - DNA, 20 bp, synthetic construct
  source 1..20: mol_type = other DNA
atcgtagtctatgccttttg

SEQ ID NO: 5315 - DNA, 20 bp, synthetic construct
  source 1..20: mol_type = other DNA
acagccaaattcaggatgta

SEQ ID NO: 5316 - DNA, 20 bp, synthetic construct
  source 1..20: mol_type = other DNA
ttggaacccagatgaaaatg

SEQ ID NO: 5317 - DNA, 20 bp, synthetic construct
  source 1..20: mol_type = other DNA
cccagtgcatagttaagaca

SEQ ID NO: 5318 - DNA, 20 bp, synthetic construct
  source 1..20: mol_type = other DNA
gagtcatgacccatgtagga

SEQ ID NO: 5319 - DNA, 20 bp, synthetic construct
  source 1..20: mol_type = other DNA
ccatctgcttgaagaccatg

SEQ ID NO: 5320 - DNA, 20 bp, synthetic construct
  source 1..20: mol_type = other DNA
accctcaaaacatcccaggg

SEQ ID NO: 5321 - DNA, 20 bp, synthetic construct
  source 1..20: mol_type = other DNA
agagttgatgtactcccgaa

SEQ ID NO: 5322 - DNA, 20 bp, synthetic construct
  source 1..20: mol_type = other DNA
acctagagacttccttttga

SEQ ID NO: 5323 - DNA, 20 bp, synthetic construct
  source 1..20: mol_type = other DNA
ctgtcatttctgtctctagg

SEQ ID NO: 5324 - DNA, 20 bp, synthetic construct
  source 1..20: mol_type = other DNA
tctgaaaccttctttagcca

SEQ ID NO: 5325 - DNA, 20 bp, synthetic construct
  source 1..20: mol_type = other DNA
ctcttcttctcatttcgaca

SEQ ID NO: 5326 - DNA, 20 bp, synthetic construct
  source 1..20: mol_type = other DNA
tttggccaagcaatgaagtt

SEQ ID NO: 5327 - DNA, 20 bp, synthetic construct
  source 1..20: mol_type = other DNA
gcttgcaaaagtggacaccg

SEQ ID NO: 5328 - DNA, 20 bp, synthetic construct
  source 1..20: mol_type = other DNA
gcgatgatcaccttgatggc

SEQ ID NO: 5329 - DNA, 20 bp, synthetic construct
  source 1..20: mol_type = other DNA
tcgacgcgctttagaaacgg

SEQ ID NO: 5330 - DNA, 20 bp, synthetic construct
  source 1..20: mol_type = other DNA
ctcacaaggttctggcgtgg

SEQ ID NO: 5331 - DNA, 20 bp, synthetic construct
  source 1..20: mol_type = other DNA
tacagctacttagaaacagc

SEQ ID NO: 5332 - DNA, 20 bp, synthetic construct
  source 1..20: mol_type = other DNA
ctttgcacttcacttcattg

SEQ ID NO: 5333 - DNA, 20 bp, synthetic construct
  source 1..20: mol_type = other DNA
caacaacagacccgtctcca

SEQ ID NO: 5334 - DNA, 20 bp, synthetic construct
  source 1..20: mol_type = other DNA
ctgtgacgccttcatactga

SEQ ID NO: 5335 - DNA, 20 bp, synthetic construct
  source 1..20: mol_type = other DNA
gacatatctgcaccactgat

SEQ ID NO: 5336 - DNA, 20 bp, synthetic construct
  source 1..20: mol_type = other DNA
aaaagcagagtagagagcgt

SEQ ID NO: 5337 - DNA, 20 bp, synthetic construct
  source 1..20: mol_type = other DNA
ggtgacaacagaagccaaat

SEQ ID NO: 5338 - DNA, 20 bp, synthetic construct
  source 1..20: mol_type = other DNA
agcctgacatgtcagttcat

SEQ ID NO: 5339 - DNA, 20 bp, synthetic construct
  source 1..20: mol_type = other DNA
caggaactgaccctcaaatt

SEQ ID NO: 5340 - DNA, 20 bp, synthetic construct
  source 1..20: mol_type = other DNA
gctctgtttgatctttctcc

SEQ ID NO: 5341 - DNA, 20 bp, synthetic construct
  source 1..20: mol_type = other DNA
cacactcagcattggcagtg

SEQ ID NO: 5342 - DNA, 20 bp, synthetic construct
  source 1..20: mol_type = other DNA
gaagctgctgggagtaattc

SEQ ID NO: 5343 - DNA, 20 bp, synthetic construct
  source 1..20: mol_type = other DNA
aaatgtctgtggataccaca

SEQ ID NO: 5344 - DNA, 20 bp, synthetic construct
  source 1..20: mol_type = other DNA
ctccacatatgccaatgatg

SEQ ID NO: 5345 - DNA, 20 bp, synthetic construct
  source 1..20: mol_type = other DNA
tggtccacttgtgtgtgatg

SEQ ID NO: 5346 - DNA, 20 bp, synthetic construct
  source 1..20: mol_type = other DNA
caagaatcagcctttggtcc

SEQ ID NO: 5347 - DNA, 20 bp, synthetic construct
  source 1..20: mol_type = other DNA
agaagaaaatggagacatgg

SEQ ID NO: 5348 - DNA, 20 bp, synthetic construct
  source 1..20: mol_type = other DNA
tgttgcaaggctagtgctag

SEQ ID NO: 5349 - DNA, 20 bp, synthetic construct
  source 1..20: mol_type = other DNA
cagccaccacgtgttgtctt

SEQ ID NO: 5350 - DNA, 20 bp, synthetic construct
  source 1..20: mol_type = other DNA
tcctcatgtcgagccaagac

SEQ ID NO: 5351 - DNA, 20 bp, synthetic construct
  source 1..20: mol_type = other DNA
gagctaaaacaaccacagcg

SEQ ID NO: 5352 - DNA, 20 bp, synthetic construct
  source 1..20: mol_type = other DNA
acactctgtcctcaagttcc

SEQ ID NO: 5353 - DNA, 20 bp, synthetic construct
  source 1..20: mol_type = other DNA
tgagcaagaagggaaggtac

SEQ ID NO: 5354 - DNA, 20 bp, synthetic construct
  source 1..20: mol_type = other DNA
ttcagatccaggatactgag

SEQ ID NO: 5355 - DNA, 20 bp, synthetic construct
  source 1..20: mol_type = other DNA
tgcgtctctgattcaggcca

SEQ ID NO: 5356 - DNA, 20 bp, synthetic construct
  source 1..20: mol_type = other DNA
tcagtcacattgacaaacac

SEQ ID NO: 5357 - DNA, 20 bp, synthetic construct
  source 1..20: mol_type = other DNA
tcactctggaaacaatggag

SEQ ID NO: 5358 - DNA, 20 bp, synthetic construct
  source 1..20: mol_type = other DNA
gtcattgaaagaggtcctgt

SEQ ID NO: 5359 - DNA, 20 bp, synthetic construct
  source 1..20: mol_type = other DNA
gcaggtctcaaatccgatgc

SEQ ID NO: 5360 - DNA, 20 bp, synthetic construct
  source 1..20: mol_type = other DNA
gtgtgtgagacagcatcact

SEQ ID NO: 5361 - DNA, 20 bp, synthetic construct
  source 1..20: mol_type = other DNA
ggacagtggacttgtttaga

SEQ ID NO: 5362 - DNA, 20 bp, synthetic construct
  source 1..20: mol_type = other DNA
tgctttgttccttctgcaga

SEQ ID NO: 5363 - DNA, 20 bp, synthetic construct
  source 1..20: mol_type = other DNA
aggccttcatccctgctcgt

SEQ ID NO: 5364 - DNA, 20 bp, synthetic construct
  source 1..20: mol_type = other DNA
gctttgtagggcttgcatga

SEQ ID NO: 5365 - DNA, 20 bp, synthetic construct
  source 1..20: mol_type = other DNA
ctccgcccacttggtagatg

SEQ ID NO: 5366 - DNA, 20 bp, synthetic construct
  source 1..20: mol_type = other DNA
tgaaaggagaatgtcccagg

SEQ ID NO: 5367 - DNA, 20 bp, synthetic construct
  source 1..20: mol_type = other DNA
ccctcgtcagatgggcgcag

SEQ ID NO: 5368 - DNA, 20 bp, synthetic construct
  source 1..20: mol_type = other DNA
caggcagggctgatgacaat

SEQ ID NO: 5369 - DNA, 20 bp, synthetic construct
  source 1..20: mol_type = other DNA
gaagataaaagccgcgtctt

SEQ ID NO: 5370 - DNA, 20 bp, synthetic construct
  source 1..20: mol_type = other DNA
ttgccttctggaagaaatca

SEQ ID NO: 5371 - DNA, 20 bp, synthetic construct
  source 1..20: mol_type = other DNA
gaagtacttgttcccttgcc

SEQ ID NO: 5372 - DNA, 20 bp, synthetic construct
  source 1..20: mol_type = other DNA
ccacgccctaccgcgatgtg

SEQ ID NO: 5373 - DNA, 20 bp, synthetic construct
  source 1..20: mol_type = other DNA
gagaacaagtgagtctagga

SEQ ID NO: 5374 - DNA, 20 bp, synthetic construct
  source 1..20: mol_type = other DNA
agttttgcatgaaggcttgg

SEQ ID NO: 5375 - DNA, 20 bp, synthetic construct
  source 1..20: mol_type = other DNA
tctgtaaagtttagcagtgc

SEQ ID NO: 5376 - DNA, 20 bp, synthetic construct
  source 1..20: mol_type = other DNA
gcatgttggaaatctacttg

SEQ ID NO: 5377 - DNA, 20 bp, synthetic construct
  source 1..20: mol_type = other DNA
catgaccattggtcaacagc

SEQ ID NO: 5378 - DNA, 20 bp, synthetic construct
  source 1..20: mol_type = other DNA
cctatgcccaggtagtatgg

SEQ ID NO: 5379 - DNA, 20 bp, synthetic construct
  source 1..20: mol_type = other DNA
tccatggcattaaccacatg

SEQ ID NO: 5380 - DNA, 20 bp, synthetic construct
  source 1..20: mol_type = other DNA
cgatgcccttgttatcaatg

SEQ ID NO: 5381 - DNA, 20 bp, synthetic construct
  source 1..20: mol_type = other DNA
cctgcttagatgcatctact

SEQ ID NO: 5382 - DNA, 20 bp, synthetic construct
  source 1..20: mol_type = other DNA
ccgatctgcttctcgaaggt

SEQ ID NO: 5383 - DNA, 20 bp, synthetic construct
  source 1..20: mol_type = other DNA
gaagagccagaacaaagtgc

SEQ ID NO: 5384 - DNA, 20 bp, synthetic construct
  source 1..20: mol_type = other DNA
cagcagaggcctagcaagtc

SEQ ID NO: 5385 - DNA, 20 bp, synthetic construct
  source 1..20: mol_type = other DNA
ggcttgttccaaaagccggg

SEQ ID NO: 5386 - DNA, 20 bp, synthetic construct
  source 1..20: mol_type = other DNA
cttctgctgccgtcgcttga

SEQ ID NO: 5387 - DNA, 20 bp, synthetic construct
  source 1..20: mol_type = other DNA
gacggtcatcgtccgtgacc

SEQ ID NO: 5388 - DNA, 20 bp, synthetic construct
  source 1..20: mol_type = other DNA
gaaaaatgggctttgtctgt

SEQ ID NO: 5389 - DNA, 20 bp, synthetic construct
  source 1..20: mol_type = other DNA
aaaacttcagtcttctgcct

SEQ ID NO: 5390 - DNA, 20 bp, synthetic construct
  source 1..20: mol_type = other DNA
actgtaccggaacctgtagt

SEQ ID NO: 5391 - DNA, 20 bp, synthetic construct
  source 1..20: mol_type = other DNA
acttgatgatgtagccggta

SEQ ID NO: 5392 - DNA, 20 bp, synthetic construct
  source 1..20: mol_type = other DNA
tctgcttgtcaaagtgtcct

SEQ ID NO: 5393 - DNA, 20 bp, synthetic construct
  source 1..20: mol_type = other DNA
ggaccaggttgtaaaaaggg

SEQ ID NO: 5394 - DNA, 20 bp, synthetic construct
  source 1..20: mol_type = other DNA
acaattacagggacttgttc

SEQ ID NO: 5395 - DNA, 20 bp, synthetic construct
  source 1..20: mol_type = other DNA
aggcacgggcaggatttctc

SEQ ID NO: 5396 - DNA, 20 bp, synthetic construct
  source 1..20: mol_type = other DNA
ggagagtggattctggatcg

SEQ ID NO: 5397 - DNA, 20 bp, synthetic construct
  source 1..20: mol_type = other DNA
ggctgtaatgcagaggcatt

SEQ ID NO: 5398 - DNA, 20 bp, synthetic construct
  source 1..20: mol_type = other DNA
ttgggagttattaagagcgc

SEQ ID NO: 5399 - DNA, 20 bp, synthetic construct
  source 1..20: mol_type = other DNA
actaagtaggaccatgtagg

SEQ ID NO: 5400 - DNA, 20 bp, synthetic construct
  source 1..20: mol_type = other DNA
cagcacgaagtcgtctcgta

SEQ ID NO: 5401 - DNA, 20 bp, synthetic construct
  source 1..20: mol_type = other DNA
actgtcagcaacacttcctg

SEQ ID NO: 5402 - DNA, 20 bp, synthetic construct
  source 1..20: mol_type = other DNA
ctcattctttgagagagagt

SEQ ID NO: 5403 - DNA, 20 bp, synthetic construct
  source 1..20: mol_type = other DNA
acctccagagactatagcgt

SEQ ID NO: 5404 - DNA, 20 bp, synthetic construct
  source 1..20: mol_type = other DNA
tcattatgcctgggatttgg

SEQ ID NO: 5405 - DNA, 20 bp, synthetic construct
  source 1..20: mol_type = other DNA
tggccaatacacaccaatca

SEQ ID NO: 5406 - DNA, 20 bp, synthetic construct
  source 1..20: mol_type = other DNA
agcctcaaagctggcaaatc

SEQ ID NO: 5407 - DNA, 20 bp, synthetic construct
  source 1..20: mol_type = other DNA
tcagcacagctatgatgaaa

SEQ ID NO: 5408 - DNA, 20 bp, synthetic construct
  source 1..20: mol_type = other DNA
ggcagctctaaaatcacagc

SEQ ID NO: 5409 - DNA, 20 bp, synthetic construct
  source 1..20: mol_type = other DNA
gaagctggccagactctatg

SEQ ID NO: 5410 - DNA, 20 bp, synthetic construct
  source 1..20: mol_type = other DNA
gggtcctggcagtaacagcc

SEQ ID NO: 5411 - DNA, 20 bp, synthetic construct
  source 1..20: mol_type = other DNA
cctgagataaagccttgtaa

SEQ ID NO: 5412 - DNA, 20 bp, synthetic construct
  source 1..20: mol_type = other DNA
tgcttgtcatgtagtagctg

SEQ ID NO: 5413 - DNA, 20 bp, synthetic construct
  source 1..20: mol_type = other DNA
cggcgctgaaagtggcattg

SEQ ID NO: 5414 - DNA, 20 bp, synthetic construct
  source 1..20: mol_type = other DNA
ccggtcgagaaggaagcctg

SEQ ID NO: 5415 - DNA, 20 bp, synthetic construct
  source 1..20: mol_type = other DNA
cataccactggaaacagcaa

SEQ ID NO: 5416 - DNA, 20 bp, synthetic construct
  source 1..20: mol_type = other DNA
cccgaggatgaagccattgt

SEQ ID NO: 5417 - DNA, 20 bp, synthetic construct
  source 1..20: mol_type = other DNA
ttagcctgcaggtctaaccc

SEQ ID NO: 5418 - DNA, 20 bp, synthetic construct
  source 1..20: mol_type = other DNA
aaagtcttcactctgctgaa

SEQ ID NO: 5419 - DNA, 20 bp, synthetic construct
  source 1..20: mol_type = other DNA
caagaagcaaattggtactc

SEQ ID NO: 5420 - DNA, 20 bp, synthetic construct
  source 1..20: mol_type = other DNA
gcataactcttcccaatagg

SEQ ID NO: 5421 - DNA, 20 bp, synthetic construct
  source 1..20: mol_type = other DNA
agtcccggagcgtgcagttc

SEQ ID NO: 5422 - DNA, 20 bp, synthetic construct
  source 1..20: mol_type = other DNA
tcaggtacttctgccatggc

SEQ ID NO: 5423 - DNA, 20 bp, synthetic construct
  source 1..20: mol_type = other DNA
accttgtcttcccgtgggtc

SEQ ID NO: 5424 - DNA, 20 bp, synthetic construct
  source 1..20: mol_type = other DNA
gacttctgttgtctgttccc

SEQ ID NO: 5425 - DNA, 20 bp, synthetic construct
  source 1..20: mol_type = other DNA
caccctcagggtgacgatgt

SEQ ID NO: 5426 - DNA, 20 bp, synthetic construct
  source 1..20: mol_type = other DNA
aggcaacaggaatcctgacc

SEQ ID NO: 5427 - DNA, 20 bp, synthetic construct
  source 1..20: mol_type = other DNA
aacaacaacaatctgaggtg

SEQ ID NO: 5428 - DNA, 20 bp, synthetic construct
  source 1..20: mol_type = other DNA
tgtggcatcttgcagagttt

SEQ ID NO: 5429 - DNA, 20 bp, synthetic construct
  source 1..20: mol_type = other DNA
tctctggagttctgaagtaa

SEQ ID NO: 5430 - DNA, 20 bp, synthetic construct
  source 1..20: mol_type = other DNA
cttgactcatgttgagtgcc

SEQ ID NO: 5431 - DNA, 20 bp, synthetic construct
  source 1..20: mol_type = other DNA
cgggatttggttggaattaa

SEQ ID NO: 5432 - DNA, 20 bp, synthetic construct
  source 1..20: mol_type = other DNA
tggttcagccggacgggcac

SEQ ID NO: 5433 - DNA, 20 bp, synthetic construct
  source 1..20: mol_type = other DNA
ggaggttcccgaaagcagac

SEQ ID NO: 5434 - DNA, 20 bp, synthetic construct
  source 1..20: mol_type = other DNA
tcctctgtgtccaagttgaa

SEQ ID NO: 5435 - DNA, 20 bp, synthetic construct
  source 1..20: mol_type = other DNA
cctagcttcttgacattcct

SEQ ID NO: 5436 - DNA, 20 bp, synthetic construct
  source 1..20: mol_type = other DNA
tcgcagcttatcagggtgcg

SEQ ID NO: 5437 - DNA, 20 bp, synthetic construct
  source 1..20: mol_type = other DNA
agctgtgtagcacttgtttc

SEQ ID NO: 5438 - DNA, 20 bp, synthetic construct
  source 1..20: mol_type = other DNA
cctggacaaaaataccaatc

SEQ ID NO: 5439 - DNA, 20 bp, synthetic construct
  source 1..20: mol_type = other DNA
tatcagtgaaggttctgttc

SEQ ID NO: 5440 - DNA, 20 bp, synthetic construct
  source 1..20: mol_type = other DNA
cactttgtgccactaaatgt

SEQ ID NO: 5441 - DNA, 20 bp, synthetic construct
  source 1..20: mol_type = other DNA
tcttcacggcttgccgcgtg

SEQ ID NO: 5442 - DNA, 20 bp, synthetic construct
  source 1..20: mol_type = other DNA
gacatcaacgaaaggcatat

SEQ ID NO: 5443 - DNA, 20 bp, synthetic construct
  source 1..20: mol_type = other DNA
cacccaagtccatgtcattt

SEQ ID NO: 5444 - DNA, 20 bp, synthetic construct
  source 1..20: mol_type = other DNA
cctgaggaaataagatgtag

SEQ ID NO: 5445 - DNA, 20 bp, synthetic construct
  source 1..20: mol_type = other DNA
tatccctgctgttaatctca

SEQ ID NO: 5446 - DNA, 20 bp, synthetic construct
  source 1..20: mol_type = other DNA
cggagggtgaatcccttgct

SEQ ID NO: 5447 - DNA, 20 bp, synthetic construct
  source 1..20: mol_type = other DNA
gttccatggcaccttatttt

SEQ ID NO: 5448 - DNA, 20 bp, synthetic construct
  source 1..20: mol_type = other DNA
catgatagctagcgcttttc

SEQ ID NO: 5449 - DNA, 20 bp, synthetic construct
  source 1..20: mol_type = other DNA
ataacctctggagcacagat

SEQ ID NO: 5450 - DNA, 20 bp, synthetic construct
  source 1..20: mol_type = other DNA
tagagagtgatagcaaccca

SEQ ID NO: 5451 - DNA, 20 bp, synthetic construct
  source 1..20: mol_type = other DNA
tagagtgggagttaggaaaa

SEQ ID NO: 5452 - DNA, 20 bp, synthetic construct
  source 1..20: mol_type = other DNA
atgaagaagctttgcgtggg

SEQ ID NO: 5453 - DNA, 20 bp, synthetic construct
  source 1..20: mol_type = other DNA
ctgtgctggagtatggctcc

SEQ ID NO: 5454 - DNA, 20 bp, synthetic construct
  source 1..20: mol_type = other DNA
gacgtggtcactgccagacg

SEQ ID NO: 5455 - DNA, 20 bp, synthetic construct
  source 1..20: mol_type = other DNA
ccgtatccgcgctgtacgtg

SEQ ID NO: 5456 - DNA, 20 bp, synthetic construct
  source 1..20: mol_type = other DNA
cagtccagtccagagtcctt

SEQ ID NO: 5457 - DNA, 20 bp, synthetic construct
  source 1..20: mol_type = other DNA
tgttggcaggaacgctgacg

SEQ ID NO: 5458 - DNA, 20 bp, synthetic construct
  source 1..20: mol_type = other DNA
tccagaagcttctttagatg

SEQ ID NO: 5459 - DNA, 20 bp, synthetic construct
  source 1..20: mol_type = other DNA
gccctgaccacgctcatgtg

SEQ ID NO: 5460 - DNA, 20 bp, synthetic construct
  source 1..20: mol_type = other DNA
tagtagacattcacccattc

SEQ ID NO: 5461 - DNA, 20 bp, synthetic construct
  source 1..20: mol_type = other DNA
gctgttcatgatgcgaatac

SEQ ID NO: 5462 - DNA, 20 bp, synthetic construct
  source 1..20: mol_type = other DNA
cgccctcgcctttgctttgg

SEQ ID NO: 5463 - DNA, 20 bp, synthetic construct
  source 1..20: mol_type = other DNA
cggaggtcagcggactctgg

SEQ ID NO: 5464 - DNA, 20 bp, synthetic construct
  source 1..20: mol_type = other DNA
cacgtcctcgagccggtcag

SEQ ID NO: 5465 - DNA, 20 bp, synthetic construct
  source 1..20: mol_type = other DNA
tcttggcgcaaacgttgcat

SEQ ID NO: 5466 - DNA, 20 bp, synthetic construct
  source 1..20: mol_type = other DNA
tgcaccaggcacgaacttgt

SEQ ID NO: 5467 - DNA, 20 bp, synthetic construct
  source 1..20: mol_type = other DNA
gacaagcttggtctaatggg

SEQ ID NO: 5468 - DNA, 20 bp, synthetic construct
  source 1..20: mol_type = other DNA
gcctggtgaatgattcaaca

SEQ ID NO: 5469 - DNA, 20 bp, synthetic construct
  source 1..20: mol_type = other DNA
tccatccttgaaaaggcgca

SEQ ID NO: 5470 - DNA, 20 bp, synthetic construct
  source 1..20: mol_type = other DNA
ggctgcctttagtttgtggc

SEQ ID NO: 5471 - DNA, 20 bp, synthetic construct
  source 1..20: mol_type = other DNA
ctttcaacttgagcaggacc

SEQ ID NO: 5472 - DNA, 20 bp, synthetic construct
  source 1..20: mol_type = other DNA
gtcaggccgcagtacacacc

SEQ ID NO: 5473 - DNA, 20 bp, synthetic construct
  source 1..20: mol_type = other DNA
tgctggaaaagactgaaggt

SEQ ID NO: 5474 - DNA, 20 bp, synthetic construct
  source 1..20: mol_type = other DNA
ctgtcaagctctttctgttt

SEQ ID NO: 5475 - DNA, 20 bp, synthetic construct
  source 1..20: mol_type = other DNA
aatttgttgacgggtctgaa

SEQ ID NO: 5476 - DNA, 20 bp, synthetic construct
  source 1..20: mol_type = other DNA
ggagttgatctgagttaaga

SEQ ID NO: 5477 - DNA, 20 bp, synthetic construct
  source 1..20: mol_type = other DNA
agaaggtctgatggagaatg

SEQ ID NO: 5478 - DNA, 20 bp, synthetic construct
  source 1..20: mol_type = other DNA
tgcccaccaatgtagaggat

SEQ ID NO: 5479 - DNA, 20 bp, synthetic construct
  source 1..20: mol_type = other DNA
tatggtgagaatggacatga

SEQ ID NO: 5480 - DNA, 20 bp, synthetic construct
  source 1..20: mol_type = other DNA
atcggctcggtgcccgtcag

SEQ ID NO: 5481 - DNA, 20 bp, synthetic construct
  source 1..20: mol_type = other DNA
gctgactgctcgaaactcag

SEQ ID NO: 5482 - DNA, 20 bp, synthetic construct
  source 1..20: mol_type = other DNA
tctctccaccagaatctaag

SEQ ID NO: 5483 - DNA, 20 bp, synthetic construct
  source 1..20: mol_type = other DNA
catcatccagctgagaaaag

SEQ ID NO: 5484 - DNA, 20 bp, synthetic construct
  source 1..20: mol_type = other DNA
caggagcagtgggcgctaag

SEQ ID NO: 5485 - DNA, 20 bp, synthetic construct
  source 1..20: mol_type = other DNA
tgcatctcagagtgttgcta

SEQ ID NO: 5486 - DNA, 20 bp, synthetic construct
  source 1..20: mol_type = other DNA
catttcagtaacctgaccca

SEQ ID NO: 5487 - DNA, 20 bp, synthetic construct
  source 1..20: mol_type = other DNA
ttttaaccatgcgcaagaca

SEQ ID NO: 5488 - DNA, 20 bp, synthetic construct
  source 1..20: mol_type = other DNA
gtaagcaagtcctcaaatga

SEQ ID NO: 5489 - DNA, 20 bp, synthetic construct
  source 1..20: mol_type = other DNA
gtttttcagagtgagcaaag

SEQ ID NO: 5490 - DNA, 20 bp, synthetic construct
  source 1..20: mol_type = other DNA
ttcaaaaccgtggcaagagc

SEQ ID NO: 5491 - DNA, 20 bp, synthetic construct
  source 1..20: mol_type = other DNA
caaccctaggcatgttgttc

SEQ ID NO: 5492 - DNA, 20 bp, synthetic construct
  source 1..20: mol_type = other DNA
caggctcttgcaatagtcat

SEQ ID NO: 5493 - DNA, 20 bp, synthetic construct
  source 1..20: mol_type = other DNA
ggcaggaggtatgcatggca

SEQ ID NO: 5494 - DNA, 20 bp, synthetic construct
  source 1..20: mol_type = other DNA
tgaccttgtttacaatcctg

SEQ ID NO: 5495 - DNA, 20 bp, synthetic construct
  source 1..20: mol_type = other DNA
atggtttccttggaatgcag

SEQ ID NO: 5496 - DNA, 20 bp, synthetic construct
  source 1..20: mol_type = other DNA
ttggtgtttcactgtctgca

SEQ ID NO: 5497 - DNA, 20 bp, synthetic construct
  source 1..20: mol_type = other DNA
ataaggagcacatgctatgt

SEQ ID NO: 5498 - DNA, 20 bp, synthetic construct
  source 1..20: mol_type = other DNA
gggtccagtgaagcgtcaga

SEQ ID NO: 5499 - DNA, 20 bp, synthetic construct
  source 1..20: mol_type = other DNA
gaggctcagcaatgagtgac

SEQ ID NO: 5500 - DNA, 20 bp, synthetic construct
  source 1..20: mol_type = other DNA
acatgtcaacatgactgagt

SEQ ID NO: 5501 - DNA, 20 bp, synthetic construct
  source 1..20: mol_type = other DNA
gcaggtattattaaggagga

SEQ ID NO: 5502 - DNA, 20 bp, synthetic construct
  source 1..20: mol_type = other DNA
aggatggcttgaagatgtac

SEQ ID NO: 5503 - DNA, 20 bp, synthetic construct
  source 1..20: mol_type = other DNA
aaaactctctaatcttccgg

SEQ ID NO: 5504 - DNA, 20 bp, synthetic construct
  source 1..20: mol_type = other DNA
ctgaacaaaagcatccgata

SEQ ID NO: 5505 - DNA, 20 bp, synthetic construct
  source 1..20: mol_type = other DNA
tcatacacgtactcctggac

SEQ ID NO: 5506 - DNA, 20 bp, synthetic construct
  source 1..20: mol_type = other DNA
ctggaccttggttttgttgg

SEQ ID NO: 5507 - DNA, 20 bp, synthetic construct
  source 1..20: mol_type = other DNA
attgcttgttggatgaactg

SEQ ID NO: 5508 - DNA, 20 bp, synthetic construct
  source 1..20: mol_type = other DNA
ccttccgtgaagactctgct

SEQ ID NO: 5509 - DNA, 20 bp, synthetic construct
  source 1..20: mol_type = other DNA
cctcttggaacacgctgacc

SEQ ID NO: 5510 - DNA, 20 bp, synthetic construct
  source 1..20: mol_type = other DNA
gctgagatagttctgttcac

SEQ ID NO: 5511 - DNA, 20 bp, synthetic construct
  source 1..20: mol_type = other DNA
cagttcccacactctgtatg

SEQ ID NO: 5512 - DNA, 20 bp, synthetic construct
  source 1..20: mol_type = other DNA
gggtccgtgcgatcctcagc

SEQ ID NO: 5513 - DNA, 20 bp, synthetic construct
  source 1..20: mol_type = other DNA
atcaaaacggcttccttcag

SEQ ID NO: 5514 - DNA, 20 bp, synthetic construct
  source 1..20: mol_type = other DNA
tacccgccaagcggtcgatg

SEQ ID NO: 5515 - DNA, 20 bp, synthetic construct
  source 1..20: mol_type = other DNA
cgttctttgcttgaaatcag

SEQ ID NO: 5516 - DNA, 20 bp, synthetic construct
  source 1..20: mol_type = other DNA
ccacggcgatgtcgctggga

SEQ ID NO: 5517 - DNA, 20 bp, synthetic construct
  source 1..20: mol_type = other DNA
aatgaaacggattcccatgg

SEQ ID NO: 5518 - DNA, 20 bp, synthetic construct
  source 1..20: mol_type = other DNA
aggctggagaataatgcctt

SEQ ID NO: 5519 - DNA, 20 bp, synthetic construct
  source 1..20: mol_type = other DNA
tggctgtcggtccatgtagg

SEQ ID NO: 5520 - DNA, 20 bp, synthetic construct
  source 1..20: mol_type = other DNA
ctcatcagggtggtatccga

SEQ ID NO: 5521 - DNA, 20 bp, synthetic construct
  source 1..20: mol_type = other DNA
tggtctcatcgagtgagcgg

SEQ ID NO: 5522 - DNA, 20 bp, synthetic construct
  source 1..20: mol_type = other DNA
cagtttgacgatgcggttgt

SEQ ID NO: 5523 - DNA, 20 bp, synthetic construct
  source 1..20: mol_type = other DNA
gtactcactggaccacactg

SEQ ID NO: 5524 - DNA, 20 bp, synthetic construct
  source 1..20: mol_type = other DNA
ggatgatctctatgtgaaag

SEQ ID NO: 5525 - DNA, 20 bp, synthetic construct
  source 1..20: mol_type = other DNA
atggccttcgattctggatt

SEQ ID NO: 5526 - DNA, 20 bp, synthetic construct
  source 1..20: mol_type = other DNA
actttgtaaactccgatggt

SEQ ID NO: 5527 - DNA, 20 bp, synthetic construct
  source 1..20: mol_type = other DNA
cacaatatcacagccaaggc

SEQ ID NO: 5528 - DNA, 20 bp, synthetic construct
  source 1..20: mol_type = other DNA
cttggacaaccattcccacg

SEQ ID NO: 5529 - DNA, 20 bp, synthetic construct
  source 1..20: mol_type = other DNA
gcatgagaagcagagatgtc

SEQ ID NO: 5530 - DNA, 20 bp, synthetic construct
  source 1..20: mol_type = other DNA
ctctagcgcttagtacttca

SEQ ID NO: 5531 - DNA, 20 bp, synthetic construct
  source 1..20: mol_type = other DNA
agtccagaatatccgcaagt

SEQ ID NO: 5532 - DNA, 20 bp, synthetic construct
  source 1..20: mol_type = other DNA
gcttctctcgcattcttctg

SEQ ID NO: 5533 - DNA, 20 bp, synthetic construct
  source 1..20: mol_type = other DNA
cggcaacctcggcgtcattt

SEQ ID NO: 5534 - DNA, 20 bp, synthetic construct
  source 1..20: mol_type = other DNA
gtgacagcttggagatgata

SEQ ID NO: 5535 - DNA, 20 bp, synthetic construct
  source 1..20: mol_type = other DNA
actgtaggtgctgaaatcaa

SEQ ID NO: 5536 - DNA, 20 bp, synthetic construct
  source 1..20: mol_type = other DNA
acatcttagccagaacttga

SEQ ID NO: 5537 - DNA, 20 bp, synthetic construct
  source 1..20: mol_type = other DNA
gatggccttggctgactttg

SEQ ID NO: 5538 - DNA, 20 bp, synthetic construct
  source 1..20: mol_type = other DNA
ttggaattgtcctcagaaga

SEQ ID NO: 5539 - DNA, 20 bp, synthetic construct
  source 1..20: mol_type = other DNA
cagttaacacagtttatggc

SEQ ID NO: 5540 - DNA, 20 bp, synthetic construct
  source 1..20: mol_type = other DNA
ggtgtccttgcacgtggctt

SEQ ID NO: 5541 - DNA, 20 bp, synthetic construct
  source 1..20: mol_type = other DNA
tccctgcctcggctgacatt

SEQ ID NO: 5542 - DNA, 20 bp, synthetic construct
  source 1..20: mol_type = other DNA
tcacttacatggacgtgaag

SEQ ID NO: 5543 - DNA, 20 bp, synthetic construct
  source 1..20: mol_type = other DNA
ggcgttgattacgcaggatt

SEQ ID NO: 5544 - DNA, 20 bp, synthetic construct
  source 1..20: mol_type = other DNA
aatcatagccgctccattgc

SEQ ID NO: 5545 - DNA, 20 bp, synthetic construct
  source 1..20: mol_type = other DNA
tacgatgccggagcgaacga

SEQ ID NO: 5546 - DNA, 20 bp, synthetic construct
  source 1..20: mol_type = other DNA
ggcccgaagatcaaagacgc

SEQ ID NO: 5547 - DNA, 20 bp, synthetic construct
  source 1..20: mol_type = other DNA
atgcttgaaggtttcactag

SEQ ID NO: 5548 - DNA, 20 bp, synthetic construct
  source 1..20: mol_type = other DNA
ggtagacgaaatgatcgtgg

SEQ ID NO: 5549 - DNA, 20 bp, synthetic construct
  source 1..20: mol_type = other DNA
gtatgtaaggcctgaccgga

SEQ ID NO: 5550 - DNA, 20 bp, synthetic construct
  source 1..20: mol_type = other DNA
gtacagatggcggcaagcat

SEQ ID NO: 5551 - DNA, 20 bp, synthetic construct
  source 1..20: mol_type = other DNA
cacgccggttatctcttgca

SEQ ID NO: 5552 - DNA, 20 bp, synthetic construct
  source 1..20: mol_type = other DNA
cctatttttagcgcttcttc

SEQ ID NO: 5553 - DNA, 20 bp, synthetic construct
  source 1..20: mol_type = other DNA
ctgttgacggattgctctaa

SEQ ID NO: 5554 - DNA, 20 bp, synthetic construct
  source 1..20: mol_type = other DNA
agaagtccttggagatgtcg

SEQ ID NO: 5555 - DNA, 20 bp, synthetic construct
  source 1..20: mol_type = other DNA
ttgtcgcaaagcgggcacat

SEQ ID NO: 5556 - DNA, 20 bp, synthetic construct
  source 1..20: mol_type = other DNA
tttttccatatcctggcagg

SEQ ID NO: 5557 - DNA, 20 bp, synthetic construct
  source 1..20: mol_type = other DNA
tactctatagtgggactgag

SEQ ID NO: 5558 - DNA, 20 bp, synthetic construct
  source 1..20: mol_type = other DNA
agtagaggattaaaggagtg

SEQ ID NO: 5559 - DNA, 20 bp, synthetic construct
  source 1..20: mol_type = other DNA
cgggctgtgtaggtgacggt

SEQ ID NO: 5560 - DNA, 20 bp, synthetic construct
  source 1..20: mol_type = other DNA
ctccggatgcattcctgccc

SEQ ID NO: 5561 - DNA, 20 bp, synthetic construct
  source 1..20: mol_type = other DNA
tggacaaggtagaactgaga

SEQ ID NO: 5562 - DNA, 20 bp, synthetic construct
  source 1..20: mol_type = other DNA
tcgtttagttctccagacaa

SEQ ID NO: 5563 - DNA, 20 bp, synthetic construct
  source 1..20: mol_type = other DNA
ccttgtccatcaagtgaacc

SEQ ID NO: 5564 - DNA, 20 bp, synthetic construct
  source 1..20: mol_type = other DNA
tgcttagctaaagggaaaca

SEQ ID NO: 5565 - DNA, 20 bp, synthetic construct
  source 1..20: mol_type = other DNA
cccggacgtgcgcaaacacc

SEQ ID NO: 5566 - DNA, 20 bp, synthetic construct
  source 1..20: mol_type = other DNA
cagaaaagacactccaagca

SEQ ID NO: 5567 - DNA, 20 bp, synthetic construct
  source 1..20: mol_type = other DNA
actcatactcctcggcactg

SEQ ID NO: 5568 - DNA, 20 bp, synthetic construct
  source 1..20: mol_type = other DNA
agaatacggtctgtgtatcc

SEQ ID NO: 5569 - DNA, 20 bp, synthetic construct
  source 1..20: mol_type = other DNA
cacggtccaaaccattcgga

SEQ ID NO: 5570 - DNA, 20 bp, synthetic construct
  source 1..20: mol_type = other DNA
agaatatcaacagccgcagg

SEQ ID NO: 5571 - DNA, 20 bp, synthetic construct
  source 1..20: mol_type = other DNA
agaacttgcacatacagtgg

SEQ ID NO: 5572 - DNA, 20 bp, synthetic construct
  source 1..20: mol_type = other DNA
ggagacgagcattattacca

SEQ ID NO: 5573 - DNA, 20 bp, synthetic construct
  source 1..20: mol_type = other DNA
tggattcctctcacagaaga

SEQ ID NO: 5574 - DNA, 20 bp, synthetic construct
  source 1..20: mol_type = other DNA
ctcaaaaggtaccacattcg

SEQ ID NO: 5575 - DNA, 20 bp, synthetic construct
  source 1..20: mol_type = other DNA
tggtccgtgtacaccactcg

SEQ ID NO: 5576 - DNA, 20 bp, synthetic construct
  source 1..20: mol_type = other DNA
ttgcaaaaagcctccatgtg

SEQ ID NO: 5577 - DNA, 20 bp, synthetic construct
  source 1..20: mol_type = other DNA
gtggtattctagctaagcac

SEQ ID NO: 5578 - DNA, 20 bp, synthetic construct
  source 1..20: mol_type = other DNA
cccaagttcctagcagattg

SEQ ID NO: 5579 - DNA, 20 bp, synthetic construct
  source 1..20: mol_type = other DNA
tggagataaagagctcttgt

SEQ ID NO: 5580 - DNA, 20 bp, synthetic construct
  source 1..20: mol_type = other DNA
cattcagcagtattggttga

SEQ ID NO: 5581 - DNA, 20 bp, synthetic construct
  source 1..20: mol_type = other DNA
gaaacttctagaaagctgcc

SEQ ID NO: 5582 - DNA, 20 bp, synthetic construct
  source 1..20: mol_type = other DNA
aactactgcaacctcaattg

SEQ ID NO: 5583 - DNA, 20 bp, synthetic construct
  source 1..20: mol_type = other DNA
tttttcctccttaactctcc

SEQ ID NO: 5584 - DNA, 20 bp, synthetic construct
  source 1..20: mol_type = other DNA
gtgggaagagatcaggtatg

SEQ ID NO: 5585 - DNA, 20 bp, synthetic construct
  source 1..20: mol_type = other DNA
gggttcatcattacctggag

SEQ ID NO: 5586 - DNA, 20 bp, synthetic construct
  source 1..20: mol_type = other DNA
gtgaactgcttggtgtatgg

SEQ ID NO: 5587 - DNA, 20 bp, synthetic construct
  source 1..20: mol_type = other DNA
acttgtgataccacaaatgc

SEQ ID NO: 5588 - DNA, 20 bp, synthetic construct
  source 1..20: mol_type = other DNA
ggtcatagggtcatagaatt

SEQ ID NO: 5589 - DNA, 20 bp, synthetic construct
  source 1..20: mol_type = other DNA
aggcggagagtttgcaggtg

SEQ ID NO: 5590 - DNA, 20 bp, synthetic construct
  source 1..20: mol_type = other DNA
ttgtagaagtcccggataat

SEQ ID NO: 5591 - DNA, 20 bp, synthetic construct
  source 1..20: mol_type = other DNA
tttgagatggatctgttgac

SEQ ID NO: 5592 - DNA, 20 bp, synthetic construct
  source 1..20: mol_type = other DNA
cagcggattgtagaagtctt

SEQ ID NO: 5593 - DNA, 20 bp, synthetic construct
  source 1..20: mol_type = other DNA
tgcagcgctttctccgccac

SEQ ID NO: 5594 - DNA, 20 bp, synthetic construct
  source 1..20: mol_type = other DNA
atttgctgtttagtgttggc

SEQ ID NO: 5595 - DNA, 20 bp, synthetic construct
  source 1..20: mol_type = other DNA
cgtttactgcgtaagagcag

SEQ ID NO: 5596 - DNA, 20 bp, synthetic construct
  source 1..20: mol_type = other DNA
agtgggtttgacgaggactg

SEQ ID NO: 5597 - DNA, 20 bp, synthetic construct
  source 1..20: mol_type = other DNA
gtaaatagcgcgtccctcaa

SEQ ID NO: 5598 - DNA, 20 bp, synthetic construct
  source 1..20: mol_type = other DNA
tctccttttcagactctgcg

SEQ ID NO: 5599 - DNA, 20 bp, synthetic construct
  source 1..20: mol_type = other DNA
gggctatcacacacttgttc

SEQ ID NO: 5600 - DNA, 20 bp, synthetic construct
  source 1..20: mol_type = other DNA
acagcacgagctaatttgtc

SEQ ID NO: 5601 - DNA, 20 bp, synthetic construct
  source 1..20: mol_type = other DNA
cacccatggacgtacggcgc

SEQ ID NO: 5602 - DNA, 20 bp, synthetic construct
  source 1..20: mol_type = other DNA
ggaacatagcagctcgtacc

SEQ ID NO: 5603 - DNA, 20 bp, synthetic construct
  source 1..20: mol_type = other DNA
ctgcctacaacaggtcagta

SEQ ID NO: 5604 - DNA, 20 bp, synthetic construct
  source 1..20: mol_type = other DNA
cctgcggactcgagggacac

SEQ ID NO: 5605 - DNA, 20 bp, synthetic construct
  source 1..20: mol_type = other DNA
tggatgctgattgaggacaa

SEQ ID NO: 5606 - DNA, 20 bp, synthetic construct
  source 1..20: mol_type = other DNA
ttgaagacgccttcatgccg

SEQ ID NO: 5607 - DNA, 20 bp, synthetic construct
  source 1..20: mol_type = other DNA
aaggtcaaggtcactcgagc

SEQ ID NO: 5608 - DNA, 20 bp, synthetic construct
  source 1..20: mol_type = other DNA
tgctcttctcccaagttttg

SEQ ID NO: 5609 - DNA, 20 bp, synthetic construct
  source 1..20: mol_type = other DNA
cggaccgcgtcgaaggtgct

SEQ ID NO: 5610 - DNA, 20 bp, synthetic construct
  source 1..20: mol_type = other DNA
tgcacacttcttgtagaagg

SEQ ID NO: 5611 - DNA, 20 bp, synthetic construct
  source 1..20: mol_type = other DNA
gtccgcagagtccgagtctg

SEQ ID NO: 5612 - DNA, 20 bp, synthetic construct
  source 1..20: mol_type = other DNA
cgtctggtttcctgtaggac

SEQ ID NO: 5613 - DNA, 20 bp, synthetic construct
  source 1..20: mol_type = other DNA
attggtgattatgtcgccgt

SEQ ID NO: 5614 - DNA, 20 bp, synthetic construct
  source 1..20: mol_type = other DNA
ggctcagcagactaattaca

SEQ ID NO: 5615 - DNA, 20 bp, synthetic construct
  source 1..20: mol_type = other DNA
gttctacctgaaagaccttg

SEQ ID NO: 5616 - DNA, 20 bp, synthetic construct
  source 1..20: mol_type = other DNA
gaagatggaaggatctcacg

SEQ ID NO: 5617 - DNA, 20 bp, synthetic construct
  source 1..20: mol_type = other DNA
gcaacatggttaagctttgg

SEQ ID NO: 5618 - DNA, 20 bp, synthetic construct
  source 1..20: mol_type = other DNA
ttcacacttgctgaatatgg

SEQ ID NO: 5619 - DNA, 20 bp, synthetic construct
  source 1..20: mol_type = other DNA
cgccaaaatcatagaccaca

SEQ ID NO: 5620 - DNA, 20 bp, synthetic construct
  source 1..20: mol_type = other DNA
actggccaaatccttgcgta

SEQ ID NO: 5621 - DNA, 20 bp, synthetic construct
  source 1..20: mol_type = other DNA
tctgcgcaccgtcctccgaa

SEQ ID NO: 5622 - DNA, 20 bp, synthetic construct
  source 1..20: mol_type = other DNA
ctatgggtccgtgtttgata

SEQ ID NO: 5623 - DNA, 20 bp, synthetic construct
  source 1..20: mol_type = other DNA
ctggcgttccatgttactcc

SEQ ID NO: 5624 - DNA, 20 bp, synthetic construct
  source 1..20: mol_type = other DNA
aagcttctgcgactgaaatc

SEQ ID NO: 5625 - DNA, 20 bp, synthetic construct
  source 1..20: mol_type = other DNA
catctttcttatgaaggtcg

SEQ ID NO: 5626 - DNA, 20 bp, synthetic construct
  source 1..20: mol_type = other DNA
tgcctacaaatgctttctca

SEQ ID NO: 5627 - DNA, 20 bp, synthetic construct
  source 1..20: mol_type = other DNA
ccttgtggatcacggacaac

SEQ ID NO: 5628 - DNA, 20 bp, synthetic construct
  source 1..20: mol_type = other DNA
cttgacactccgcgttactc

SEQ ID NO: 5629 - DNA, 20 bp, synthetic construct
  source 1..20: mol_type = other DNA
cttcctgacctgtttgcagt

SEQ ID NO: 5630 - DNA, 20 bp, synthetic construct
  source 1..20: mol_type = other DNA
ccacgatcccatacacgagg

SEQ ID NO: 5631 - DNA, 20 bp, synthetic construct
  source 1..20: mol_type = other DNA
tgccttcctttcgccactct

SEQ ID NO: 5632 - DNA, 20 bp, synthetic construct
  source 1..20: mol_type = other DNA
gaggctgcttccgttttata

SEQ ID NO: 5633 - DNA, 20 bp, synthetic construct
  source 1..20: mol_type = other DNA
tgacgtctgagatcgtcagg

SEQ ID NO: 5634 - DNA, 20 bp, synthetic construct
  source 1..20: mol_type = other DNA
accttgtcgttgggatcgca

SEQ ID NO: 5635 - DNA, 20 bp, synthetic construct
  source 1..20: mol_type = other DNA
tggtgcgtagtaggtgtcgt

SEQ ID NO: 5636 - DNA, 20 bp, synthetic construct
  source 1..20: mol_type = other DNA
cgggtccgacactttgatgg

SEQ ID NO: 5637 - DNA, 20 bp, synthetic construct
  source 1..20: mol_type = other DNA
gtccaggctgagcgtcaccg

SEQ ID NO: 5638 - DNA, 20 bp, synthetic construct
  source 1..20: mol_type = other DNA
agaggttttggccgtgctaa

SEQ ID NO: 5639 - DNA, 20 bp, synthetic construct
  source 1..20: mol_type = other DNA
ataggaagttctacgctggg

SEQ ID NO: 5640 - DNA, 20 bp, synthetic construct
  source 1..20: mol_type = other DNA
cccgggcgttagccttcatg

SEQ ID NO: 5641 - DNA, 20 bp, synthetic construct
  source 1..20: mol_type = other DNA
gcttggagtatttgcacttt

SEQ ID NO: 5642 - DNA, 20 bp, synthetic construct
  source 1..20: mol_type = other DNA
ctttcgccgactccgtcgct

SEQ ID NO: 5643 - DNA, 20 bp, synthetic construct
  source 1..20: mol_type = other DNA
ctggaagtgcagacgaaatt

SEQ ID NO: 5644 - DNA, 20 bp, synthetic construct
  source 1..20: mol_type = other DNA
agcttgctaggatggacgta

SEQ ID NO: 5645 - DNA, 20 bp, synthetic construct
  source 1..20: mol_type = other DNA
gaatgatatgcaggctaggc

SEQ ID NO: 5646 - DNA, 20 bp, synthetic construct
  source 1..20: mol_type = other DNA
ctgcaagcgtgaaagctgat

SEQ ID NO: 5647 - DNA, 20 bp, synthetic construct
  source 1..20: mol_type = other DNA
acacgagggagagcttttaa

SEQ ID NO: 5648 - DNA, 20 bp, synthetic construct
  source 1..20: mol_type = other DNA
gagaaagaacatgagctgtg

SEQ ID NO: 5649 - DNA, 20 bp, synthetic construct
  source 1..20: mol_type = other DNA
ttggagatttggtccctcga

SEQ ID NO: 5650 - DNA, 20 bp, synthetic construct
  source 1..20: mol_type = other DNA
tggatgcagatagactcgac

SEQ ID NO: 5651 - DNA, 20 bp, synthetic construct
  source 1..20: mol_type = other DNA
aagaatcaaaacgaaccgac

SEQ ID NO: 5652 - DNA, 20 bp, synthetic construct
  source 1..20: mol_type = other DNA
cgaagagccctcctttgatg

SEQ ID NO: 5653 - DNA, 20 bp, synthetic construct
  source 1..20: mol_type = other DNA
cattgcatccatgattgctt

SEQ ID NO: 5654 - DNA, 20 bp, synthetic construct
  source 1..20: mol_type = other DNA
aaaaattccctagcggcttg

SEQ ID NO: 5655 - DNA, 20 bp, synthetic construct
  source 1..20: mol_type = other DNA
tagccacctagggctacgaa

SEQ ID NO: 5656 - DNA, 20 bp, synthetic construct
  source 1..20: mol_type = other DNA
ccacccgaaaccctctagca

SEQ ID NO: 5657 - DNA, 20 bp, synthetic construct
  source 1..20: mol_type = other DNA
gtggcatagaaatgtgccgg

SEQ ID NO: 5658 - DNA, 20 bp, synthetic construct
  source 1..20: mol_type = other DNA
agagtgtggttaagcgcata

SEQ ID NO: 5659 - DNA, 20 bp, synthetic construct
  source 1..20: mol_type = other DNA
tctgcttaatagtgacgatg

SEQ ID NO: 5660 - DNA, 20 bp, synthetic construct
  source 1..20: mol_type = other DNA
gcagttcttggagactccat

SEQ ID NO: 5661 - DNA, 20 bp, synthetic construct
  source 1..20: mol_type = other DNA
gcaaaaaatgggaaagggct

SEQ ID NO: 5662 - DNA, 20 bp, synthetic construct
  source 1..20: mol_type = other DNA
atgctgagagtatatcctga

SEQ ID NO: 5663 - DNA, 20 bp, synthetic construct
  source 1..20: mol_type = other DNA
ctgagcaaaatccagagaag

SEQ ID NO: 5664 - DNA, 20 bp, synthetic construct
  source 1..20: mol_type = other DNA
aagtgcacgggaagcatata

SEQ ID NO: 5665 - DNA, 20 bp, synthetic construct
  source 1..20: mol_type = other DNA
tcctgtccaatgctttaggt

SEQ ID NO: 5666 - DNA, 20 bp, synthetic construct
  source 1..20: mol_type = other DNA
ttcatgtagccctcaaagtt

SEQ ID NO: 5667 - DNA, 20 bp, synthetic construct
  source 1..20: mol_type = other DNA
cagcttcctgaagtaaccat

SEQ ID NO: 5668 - DNA, 20 bp, synthetic construct
  source 1..20: mol_type = other DNA
tgcctctcaagctcaaggtc

SEQ ID NO: 5669 - DNA, 20 bp, synthetic construct
  source 1..20: mol_type = other DNA
ccagcgtggctgtgatagtt

SEQ ID NO: 5670 - DNA, 20 bp, synthetic construct
  source 1..20: mol_type = other DNA
taagagtcaaagcacctgta

SEQ ID NO: 5671 - DNA, 20 bp, synthetic construct
  source 1..20: mol_type = other DNA
agacagaatcctaaaacctg

SEQ ID NO: 5672 - DNA, 20 bp, synthetic construct
  source 1..20: mol_type = other DNA
tcccaggacactacacaagc

SEQ ID NO: 5673 - DNA, 20 bp, synthetic construct
  source 1..20: mol_type = other DNA
tcactgagccgctcggaaaa

SEQ ID NO: 5674 - DNA, 20 bp, synthetic construct
  source 1..20: mol_type = other DNA
acaacaagccgattgagtta

SEQ ID NO: 5675 - DNA, 20 bp, synthetic construct
  source 1..20: mol_type = other DNA
ccttgagcaatttatccacg

SEQ ID NO: 5676 - DNA, 20 bp, synthetic construct
  source 1..20: mol_type = other DNA
ggcaaagcagtctgggatta

SEQ ID NO: 5677 - DNA, 20 bp, synthetic construct
  source 1..20: mol_type = other DNA
ccctaggcccacaagtagat

SEQ ID NO: 5678 - DNA, 20 bp, synthetic construct
  source 1..20: mol_type = other DNA
aaaaaacttgcatcggacca

SEQ ID NO: 5679 - DNA, 20 bp, synthetic construct
  source 1..20: mol_type = other DNA
ccggctgttacccaactaac

SEQ ID NO: 5680 - DNA, 20 bp, synthetic construct
  source 1..20: mol_type = other DNA
tcgcacgattatgaccacgg

SEQ ID NO: 5681 - DNA, 20 bp, synthetic construct
  source 1..20: mol_type = other DNA
tctctatgtcccgaacctgg

SEQ ID NO: 5682 - DNA, 20 bp, synthetic construct
  source 1..20: mol_type = other DNA
caacggcatcttggtgatgg

SEQ ID NO: 5683 - DNA, 20 bp, synthetic construct
  source 1..20: mol_type = other DNA
gtggtctcgatgccgcggat

SEQ ID NO: 5684 - DNA, 20 bp, synthetic construct
  source 1..20: mol_type = other DNA
agtgaaaagcgcaccaacac

SEQ ID NO: 5685 - DNA, 20 bp, synthetic construct
  source 1..20: mol_type = other DNA
gtgtaacaggttagccatta

SEQ ID NO: 5686 - DNA, 20 bp, synthetic construct
  source 1..20: mol_type = other DNA
gtttgatttcctttttgccg

SEQ ID NO: 5687 - DNA, 20 bp, synthetic construct
  source 1..20: mol_type = other DNA
atcctttgagccaaagtatc

SEQ ID NO: 5688 - DNA, 20 bp, synthetic construct
  source 1..20: mol_type = other DNA
gaggcagcggtaggtgtgtt

SEQ ID NO: 5689 - DNA, 20 bp, synthetic construct
  source 1..20: mol_type = other DNA
tcccgtcacactcagggttg

SEQ ID NO: 5690 - DNA, 20 bp, synthetic construct
  source 1..20: mol_type = other DNA
tgggaagttggatccaatgg

SEQ ID NO: 5691 - DNA, 20 bp, synthetic construct
  source 1..20: mol_type = other DNA
atcaaggcattccttcaccc

SEQ ID NO: 5692 - DNA, 20 bp, synthetic construct
  source 1..20: mol_type = other DNA
aaaatgggttaacgtaggct

SEQ ID NO: 5693 - DNA, 20 bp, synthetic construct
  source 1..20: mol_type = other DNA
atgacacatcaagacagatc

SEQ ID NO: 5694 - DNA, 20 bp, synthetic construct
  source 1..20: mol_type = other DNA
cgaggaagcggcacttacag

SEQ ID NO: 5695 - DNA, 20 bp, synthetic construct
  source 1..20: mol_type = other DNA
tgtgtctgcctgatctgggt

SEQ ID NO: 5696 - DNA, 20 bp, synthetic construct
  source 1..20: mol_type = other DNA
catctgtaggcggtgaaatc

SEQ ID NO: 5697 - DNA, 20 bp, synthetic construct
  source 1..20: mol_type = other DNA
ctcttcttggctgatctggt

SEQ ID NO: 5698 - DNA, 20 bp, synthetic construct
  source 1..20: mol_type = other DNA
tccttccattcgtggaaacg

SEQ ID NO: 5699 - DNA, 20 bp, synthetic construct
  source 1..20: mol_type = other DNA
taggtggactagcatctgat

SEQ ID NO: 5700 - DNA, 20 bp, synthetic construct
  source 1..20: mol_type = other DNA
gtggatggcttccttttgcg

SEQ ID NO: 5701 - DNA, 20 bp, synthetic construct
  source 1..20: mol_type = other DNA
tcttgggagaattgggcaaa

SEQ ID NO: 5702 - DNA, 20 bp, synthetic construct
  source 1..20: mol_type = other DNA
acttacagtctcagtcctaa

SEQ ID NO: 5703 - DNA, 20 bp, synthetic construct
  source 1..20: mol_type = other DNA
caggtttcccttcaattgca

SEQ ID NO: 5704 - DNA, 20 bp, synthetic construct
  source 1..20: mol_type = other DNA
ccttgacaagaagtggtgta

SEQ ID NO: 5705 - DNA, 20 bp, synthetic construct
  source 1..20: mol_type = other DNA
acattcctaaagaagcagcg

SEQ ID NO: 5706 - DNA, 20 bp, synthetic construct
  source 1..20: mol_type = other DNA
gtcctaaagaaggactgttc

SEQ ID NO: 5707 - DNA, 20 bp, synthetic construct
  source 1..20: mol_type = other DNA
cattcagtttagggctttcc

SEQ ID NO: 5708 - DNA, 20 bp, synthetic construct
  source 1..20: mol_type = other DNA
gtaggagctagtgaaccgtg

SEQ ID NO: 5709 - DNA, 20 bp, synthetic construct
  source 1..20: mol_type = other DNA
cagtatttgtcccttaaagg

SEQ ID NO: 5710 - DNA, 20 bp, synthetic construct
  source 1..20: mol_type = other DNA
tcggtttgttcaggagtact

SEQ ID NO: 5711 - DNA, 20 bp, synthetic construct
  source 1..20: mol_type = other DNA
gcccttgcagcaactgaaag

SEQ ID NO: 5712 - DNA, 20 bp, synthetic construct
  source 1..20: mol_type = other DNA
ccacgcatcttaacgttact

SEQ ID NO: 5713 - DNA, 20 bp, synthetic construct
  source 1..20: mol_type = other DNA
aagtaatccgggactcttaa

SEQ ID NO: 5714 - DNA, 20 bp, synthetic construct
  source 1..20: mol_type = other DNA
ccttatgcaaggcagcgaca

SEQ ID NO: 5715 - DNA, 20 bp, synthetic construct
  source 1..20: mol_type = other DNA
catcttaagtaccctcagga

SEQ ID NO: 5716 - DNA, 20 bp, synthetic construct
  source 1..20: mol_type = other DNA
ggactgggagtccgggattg

SEQ ID NO: 5717 - DNA, 20 bp, synthetic construct
  source 1..20: mol_type = other DNA
catgaaggccaaactgagtc

SEQ ID NO: 5718 - DNA, 20 bp, synthetic construct
  source 1..20: mol_type = other DNA
tcacagtatactctatacgg

SEQ ID NO: 5719 - DNA, 20 bp, synthetic construct
  source 1..20: mol_type = other DNA
aagcacacgaaggttagttg

SEQ ID NO: 5720 - DNA, 20 bp, synthetic construct
  source 1..20: mol_type = other DNA
catggttcaaaccttcctct

SEQ ID NO: 5721 - DNA, 20 bp, synthetic construct
  source 1..20: mol_type = other DNA
aggtaggtgagaacggtaaa

SEQ ID NO: 5722 - DNA, 20 bp, synthetic construct
  source 1..20: mol_type = other DNA
gctttgtgagcagccaaaac

SEQ ID NO: 5723 - DNA, 20 bp, synthetic construct
  source 1..20: mol_type = other DNA
gtcaacacacgagaaggatt

SEQ ID NO: 5724 - DNA, 20 bp, synthetic construct
  source 1..20: mol_type = other DNA
cccatgagggtttaggaagg

SEQ ID NO: 5725 - DNA, 20 bp, synthetic construct
  source 1..20: mol_type = other DNA
gactctttgtgttggtgtct

SEQ ID NO: 5726 - DNA, 20 bp, synthetic construct
  source 1..20: mol_type = other DNA
ctctttggctagtgatatgc

SEQ ID NO: 5727 - DNA, 20 bp, synthetic construct
  source 1..20: mol_type = other DNA
gagttcaggctgtatatacc

SEQ ID NO: 5728 - DNA, 20 bp, synthetic construct
  source 1..20: mol_type = other DNA
cgcagcggctgcgtcttgca

SEQ ID NO: 5729 - DNA, 20 bp, synthetic construct
  source 1..20: mol_type = other DNA
tcatcgttgatgtcccatgt

SEQ ID NO: 5730 - DNA, 20 bp, synthetic construct
  source 1..20: mol_type = other DNA
gcaccagagctgaactggtc

SEQ ID NO: 5731 - DNA, 20 bp, synthetic construct
  source 1..20: mol_type = other DNA
caccaagattccacatggat

SEQ ID NO: 5732 - DNA, 20 bp, synthetic construct
  source 1..20: mol_type = other DNA
gactgccgtagggatgtggt

SEQ ID NO: 5733 - DNA, 20 bp, synthetic construct
  source 1..20: mol_type = other DNA
caggaacttatgtctatgag

SEQ ID NO: 5734 - DNA, 20 bp, synthetic construct
  source 1..20: mol_type = other DNA
cttttgctcctctgcttgga

SEQ ID NO: 5735 - DNA, 20 bp, synthetic construct
  source 1..20: mol_type = other DNA
gaaaaccggcttttatactc

SEQ ID NO: 5736 - DNA, 20 bp, synthetic construct
  source 1..20: mol_type = other DNA
ccagctcgatgaggattaag

SEQ ID NO: 5737 - DNA, 20 bp, synthetic construct
  source 1..20: mol_type = other DNA
gtttgcctgaattctcacct

SEQ ID NO: 5738 - DNA, 20 bp, synthetic construct
  source 1..20: mol_type = other DNA
gccgatacctcttggcgtac

SEQ ID NO: 5739 - DNA, 20 bp, synthetic construct
  source 1..20: mol_type = other DNA
aatctggatgtcgcagctta

SEQ ID NO: 5740 - DNA, 20 bp, synthetic construct
  source 1..20: mol_type = other DNA
gtcggagaagtaggtcttca

SEQ ID NO: 5741 - DNA, 20 bp, synthetic construct
  source 1..20: mol_type = other DNA
ctcacggaaattgctaaacc

SEQ ID NO: 5742 - DNA, 20 bp, synthetic construct
  source 1..20: mol_type = other DNA
atgtgactgtatttctgctg

SEQ ID NO: 5743 - DNA, 20 bp, synthetic construct
  source 1..20: mol_type = other DNA
cagtctcctctggacaatcc

SEQ ID NO: 5744 - DNA, 20 bp, synthetic construct
  source 1..20: mol_type = other DNA
caacctctacccggtattga

SEQ ID NO: 5745 - DNA, 20 bp, synthetic construct
  source 1..20: mol_type = other DNA
gtaacccgcgtcggaacgtt

SEQ ID NO: 5746 - DNA, 20 bp, synthetic construct
  source 1..20: mol_type = other DNA
agagggattgcaatgctcat

SEQ ID NO: 5747 - DNA, 20 bp, synthetic construct
  source 1..20: mol_type = other DNA
gttggatccgttgtgatacg

SEQ ID NO: 5748 - DNA, 20 bp, synthetic construct
  source 1..20: mol_type = other DNA
gacaactctgggtcagagtt

SEQ ID NO: 5749 - DNA, 20 bp, synthetic construct
  source 1..20: mol_type = other DNA
ggtgttcctgttgtttgcaa

SEQ ID NO: 5750 - DNA, 20 bp, synthetic construct
  source 1..20: mol_type = other DNA
cacaaacacgcacctcaaag

SEQ ID NO: 5751 - DNA, 20 bp, synthetic construct
  source 1..20: mol_type = other DNA
gggtgagatttccttttagg

SEQ ID NO: 5752 - DNA, 20 bp, synthetic construct
  source 1..20: mol_type = other DNA
acaaaggcagtgtagacttt

SEQ ID NO: 5753 - DNA, 20 bp, synthetic construct
  source 1..20: mol_type = other DNA
cctagaactatactgtgtag

SEQ ID NO: 5754 - DNA, 20 bp, synthetic construct
  source 1..20: mol_type = other DNA
cactgaatgctgagcggtat

SEQ ID NO: 5755 - DNA, 20 bp, synthetic construct
  source 1..20: mol_type = other DNA
ttgcttggatactaacacct

SEQ ID NO: 5756 - DNA, 20 bp, synthetic construct
  source 1..20: mol_type = other DNA
gtccctatttctatcatcac

SEQ ID NO: 5757 - DNA, 20 bp, synthetic construct
  source 1..20: mol_type = other DNA
tttccgtacagtctttggta

SEQ ID NO: 5758 - DNA, 20 bp, synthetic construct
  source 1..20: mol_type = other DNA
gaaccctgtccaccttagag

SEQ ID NO: 5759 - DNA, 20 bp, synthetic construct
  source 1..20: mol_type = other DNA
tcttggtttctgttgccatc

SEQ ID NO: 5760 - DNA, 20 bp, synthetic construct
  source 1..20: mol_type = other DNA
ccatagggaacagaaagttc

SEQ ID NO: 5761 - DNA, 20 bp, synthetic construct
  source 1..20: mol_type = other DNA
gcaccggaaacgggctgttt

SEQ ID NO: 5762 - DNA, 20 bp, synthetic construct
  source 1..20: mol_type = other DNA
tgagtcgtgctggagatgtg

SEQ ID NO: 5763 - DNA, 20 bp, synthetic construct
  source 1..20: mol_type = other DNA
ccaactgatagtgaaggttc

SEQ ID NO: 5764 - DNA, 20 bp, synthetic construct
  source 1..20: mol_type = other DNA
gccaaagcaaatggcacaga

SEQ ID NO: 5765 - DNA, 20 bp, synthetic construct
  source 1..20: mol_type = other DNA
ccagaagaaactccgtggcc

SEQ ID NO: 5766 - DNA, 20 bp, synthetic construct
  source 1..20: mol_type = other DNA
tgtcgcgctcgacgtcgacg

SEQ ID NO: 5767 - DNA, 20 bp, synthetic construct
  source 1..20: mol_type = other DNA
ttgcaggtttgcgatgtaag

SEQ ID NO: 5768 - DNA, 20 bp, synthetic construct
  source 1..20: mol_type = other DNA
taggttggtttcttgaagtg

SEQ ID NO: 5769 - DNA, 20 bp, synthetic construct
  source 1..20: mol_type = other DNA
ccaccaaaaaaatcaggccc

SEQ ID NO: 5770 - DNA, 20 bp, synthetic construct
  source 1..20: mol_type = other DNA
ccaggaattgaaaagcccaa

SEQ ID NO: 5771 - DNA, 20 bp, synthetic construct
  source 1..20: mol_type = other DNA
ctggcagttgcaggtctctc

SEQ ID NO: 5772 - DNA, 20 bp, synthetic construct
  source 1..20: mol_type = other DNA
atcatcctttgttgggagac

SEQ ID NO: 5773 - DNA, 20 bp, synthetic construct
  source 1..20: mol_type = other DNA
tgtatgcccgatagggcacg

SEQ ID NO: 5774 - DNA, 20 bp, synthetic construct
  source 1..20: mol_type = other DNA
cactggacattcacatcgga

SEQ ID NO: 5775 - DNA, 20 bp, synthetic construct
  source 1..20: mol_type = other DNA
ggctccgaagctgctgccgt

SEQ ID NO: 5776 - DNA, 20 bp, synthetic construct
  source 1..20: mol_type = other DNA
agacattcatggaaagccat

SEQ ID NO: 5777 - DNA, 20 bp, synthetic construct
  source 1..20: mol_type = other DNA
ctgagcagccaatttgtgtc

SEQ ID NO: 5778 - DNA, 20 bp, synthetic construct
  source 1..20: mol_type = other DNA
tctccacacccgatgtaccc

SEQ ID NO: 5779 - DNA, 20 bp, synthetic construct
  source 1..20: mol_type = other DNA
tagctacaaggtcagtatca

SEQ ID NO: 5780 - DNA, 20 bp, synthetic construct
  source 1..20: mol_type = other DNA
agcggaggacgtaccaaccg

SEQ ID NO: 5781 - DNA, 20 bp, synthetic construct
  source 1..20: mol_type = other DNA
cctcgagccgggcgaaatgc

SEQ ID NO: 5782 - DNA, 20 bp, synthetic construct
  source 1..20: mol_type = other DNA
tctccaacacgtggcagccg

SEQ ID NO: 5783 - DNA, 20 bp, synthetic construct
  source 1..20: mol_type = other DNA
ctgtttgccgtagcgtcgcc

SEQ ID NO: 5784 - DNA, 20 bp, synthetic construct
  source 1..20: mol_type = other DNA
ggaggagatgtccatttgct

SEQ ID NO: 5785 - DNA, 20 bp, synthetic construct
  source 1..20: mol_type = other DNA
ccacaagttttggcacccaa

SEQ ID NO: 5786 - DNA, 20 bp, synthetic construct
  source 1..20: mol_type = other DNA
gaagccgggactgctccacc

SEQ ID NO: 5787 - DNA, 20 bp, synthetic construct
  source 1..20: mol_type = other DNA
agcagacctttgtctgcata

SEQ ID NO: 5788 - DNA, 20 bp, synthetic construct
  source 1..20: mol_type = other DNA
atgtgtgtgttcttgtgatg

SEQ ID NO: 5789 - DNA, 20 bp, synthetic construct
  source 1..20: mol_type = other DNA
gattccagttaggaaccaag

SEQ ID NO: 5790 - DNA, 20 bp, synthetic construct
  source 1..20: mol_type = other DNA
gctgattccagttaggaacc

SEQ ID NO: 5791 - DNA, 20 bp, synthetic construct
  source 1..20: mol_type = other DNA
cgggagcctgtttcgggtgc

SEQ ID NO: 5792 - DNA, 20 bp, synthetic construct
  source 1..20: mol_type = other DNA
ctgaactcaggtaaaacatc

SEQ ID NO: 5793 - DNA, 20 bp, synthetic construct
  source 1..20: mol_type = other DNA
gttgatcatcatagtaggtg

SEQ ID NO: 5794 - DNA, 20 bp, synthetic construct
  source 1..20: mol_type = other DNA
aaaaccggacttcatctctg

SEQ ID NO: 5795 - DNA, 20 bp, synthetic construct
  source 1..20: mol_type = other DNA
ctccgcttttcaacttgcct

SEQ ID NO: 5796 - DNA, 20 bp, synthetic construct
  source 1..20: mol_type = other DNA
atcaggactgtggtaagatt

SEQ ID NO: 5797 - DNA, 20 bp, synthetic construct
  source 1..20: mol_type = other DNA
ttccatttatgcacgtgccc

SEQ ID NO: 5798 - DNA, 20 bp, synthetic construct
  source 1..20: mol_type = other DNA
cacgtacttgatgaggtcgg

SEQ ID NO: 5799 - DNA, 20 bp, synthetic construct
  source 1..20: mol_type = other DNA
acgtttggcatttcttggtc

SEQ ID NO: 5800 - DNA, 20 bp, synthetic construct
  source 1..20: mol_type = other DNA
cactgggctgttgatgaagt

SEQ ID NO: 5801 - DNA, 20 bp, synthetic construct
  source 1..20: mol_type = other DNA
gcattggattcttcaatggc

SEQ ID NO: 5802 - DNA, 20 bp, synthetic construct
  source 1..20: mol_type = other DNA
gcagtgagccagtatccttg

SEQ ID NO: 5803 - DNA, 20 bp, synthetic construct
  source 1..20: mol_type = other DNA
cgttccttcatcgtgggtga

SEQ ID NO: 5804 - DNA, 20 bp, synthetic construct
  source 1..20: mol_type = other DNA
cacatagatgtaaatgtgcc

SEQ ID NO: 5805 - DNA, 20 bp, synthetic construct
  source 1..20: mol_type = other DNA
ggagtctgtagacatagtag

SEQ ID NO: 5806 - DNA, 20 bp, synthetic construct
  source 1..20: mol_type = other DNA
gtcaccctcattgggctgca

SEQ ID NO: 5807 - DNA, 20 bp, synthetic construct
  source 1..20: mol_type = other DNA
ggaccactgctaccacatca

SEQ ID NO: 5808 - DNA, 20 bp, synthetic construct
  source 1..20: mol_type = other DNA
acggtgaccagttcactctt

SEQ ID NO: 5809 - DNA, 20 bp, synthetic construct
  source 1..20: mol_type = other DNA
actgccgccgacctgccatg

SEQ ID NO: 5810 - DNA, 20 bp, synthetic construct
  source 1..20: mol_type = other DNA
acatcttgcatccatggatg

SEQ ID NO: 5811 - DNA, 20 bp, synthetic construct
  source 1..20: mol_type = other DNA
gtctgaagtgctcgcgatgg

SEQ ID NO: 5812 - DNA, 20 bp, synthetic construct
  source 1..20: mol_type = other DNA
atcatcaccattttggttcc

SEQ ID NO: 5813 - DNA, 20 bp, synthetic construct
  source 1..20: mol_type = other DNA
tatacgaagactctgagctg

SEQ ID NO: 5814 - DNA, 20 bp, synthetic construct
  source 1..20: mol_type = other DNA
tcatttcccacatcacgtaa

SEQ ID NO: 5815 - DNA, 20 bp, synthetic construct
  source 1..20: mol_type = other DNA
aaatgctgattctggtgcaa

SEQ ID NO: 5816 - DNA, 20 bp, synthetic construct
  source 1..20: mol_type = other DNA
gatatttaggtgggagacta

SEQ ID NO: 5817 - DNA, 20 bp, synthetic construct
  source 1..20: mol_type = other DNA
tcatctcgattaccctcata

SEQ ID NO: 5818 - DNA, 20 bp, synthetic construct
  source 1..20: mol_type = other DNA
gacatgaagagagacatact

SEQ ID NO: 5819 - DNA, 20 bp, synthetic construct
  source 1..20: mol_type = other DNA
acaacaggaaggttaaggtg

SEQ ID NO: 5820 - DNA, 20 bp, synthetic construct
  source 1..20: mol_type = other DNA
ccttggctgaacctaccgac

SEQ ID NO: 5821 - DNA, 20 bp, synthetic construct
  source 1..20: mol_type = other DNA
ttcttaaccctgatgctgtc

SEQ ID NO: 5822 - DNA, 20 bp, synthetic construct
  source 1..20: mol_type = other DNA
gaggtttctgggttcctacc

SEQ ID NO: 5823 - DNA, 20 bp, synthetic construct
  source 1..20: mol_type = other DNA
agggttttggaaacattcca

SEQ ID NO: 5824 - DNA, 20 bp, synthetic construct
  source 1..20: mol_type = other DNA
tgcactctgaactgttttgg

SEQ ID NO: 5825 - DNA, 20 bp, synthetic construct
  source 1..20: mol_type = other DNA
tttaaggtgactctggtagt

SEQ ID NO: 5826 - DNA, 20 bp, synthetic construct
  source 1..20: mol_type = other DNA
ggcattgaagggatgagaac

SEQ ID NO: 5827 - DNA, 20 bp, synthetic construct
  source 1..20: mol_type = other DNA
ggcccaattttctccatcag

SEQ ID NO: 5828 - DNA, 20 bp, synthetic construct
  source 1..20: mol_type = other DNA
tacagatgtcatacatccca

SEQ ID NO: 5829 - DNA, 20 bp, synthetic construct
  source 1..20: mol_type = other DNA
ttcacagcattgagctgggt

SEQ ID NO: 5830 - DNA, 20 bp, synthetic construct
  source 1..20: mol_type = other DNA
catccactgtacttaaatgg

SEQ ID NO: 5831 - DNA, 20 bp, synthetic construct
  source 1..20: mol_type = other DNA
acattgcgcgtctcagtgga

SEQ ID NO: 5832 - DNA, 20 bp, synthetic construct
  source 1..20: mol_type = other DNA
gcatagcttagcgcagattc

SEQ ID NO: 5833 - DNA, 20 bp, synthetic construct
  source 1..20: mol_type = other DNA
gtgtgtacctgctggttgcc

SEQ ID NO: 5834 - DNA, 20 bp, synthetic construct
  source 1..20: mol_type = other DNA
ccatcaacacaagtggctcc

SEQ ID NO: 5835 - DNA, 20 bp, synthetic construct
  source 1..20: mol_type = other DNA
ggcaaagttctcttccattt

SEQ ID NO: 5836 - DNA, 20 bp, synthetic construct
  source 1..20: mol_type = other DNA
gtgttcttgaactcggtgtt

SEQ ID NO: 5837 - DNA, 20 bp, synthetic construct
  source 1..20: mol_type = other DNA
ccctgggaaactcagctgct

SEQ ID NO: 5838 - DNA, 20 bp, synthetic construct
  source 1..20: mol_type = other DNA
ttgtcgtcgtcctcgaggaa

SEQ ID NO: 5839 - DNA, 20 bp, synthetic construct
  source 1..20: mol_type = other DNA
gttgaggcagctgtgaaaga

SEQ ID NO: 5840 - DNA, 20 bp, synthetic construct
  source 1..20: mol_type = other DNA
ctcttcttcgttacagcaga

SEQ ID NO: 5841 - DNA, 20 bp, synthetic construct
  source 1..20: mol_type = other DNA
tgggctgatagtcagcagct

SEQ ID NO: 5842 - DNA, 20 bp, synthetic construct
  source 1..20: mol_type = other DNA
gacctcatagaggtagctgg

SEQ ID NO: 5843 - DNA, 20 bp, synthetic construct
  source 1..20: mol_type = other DNA
ttaccattgctcagtgacag

SEQ ID NO: 5844 - DNA, 20 bp, synthetic construct
  source 1..20: mol_type = other DNA
acttgctgctggtgattctt

SEQ ID NO: 5845 - DNA, 20 bp, synthetic construct
  source 1..20: mol_type = other DNA
ctgctgtgtggtagaatctg

SEQ ID NO: 5846 - DNA, 20 bp, synthetic construct
  source 1..20: mol_type = other DNA
tggtatgtcaggcttctcag

SEQ ID NO: 5847 - DNA, 20 bp, synthetic construct
  source 1..20: mol_type = other DNA
agcgcttggtgatgtgcttt

SEQ ID NO: 5848 - DNA, 20 bp, synthetic construct
  source 1..20: mol_type = other DNA
tctgtcacctgcatagcttg

SEQ ID NO: 5849 - DNA, 20 bp, synthetic construct
  source 1..20: mol_type = other DNA
catagaatcctcccaacaac

SEQ ID NO: 5850 - DNA, 20 bp, synthetic construct
  source 1..20: mol_type = other DNA
ttgtctccgatgtaatcgtc

SEQ ID NO: 5851 - DNA, 20 bp, synthetic construct
  source 1..20: mol_type = other DNA
tcttgacgcattgtaggttg

SEQ ID NO: 5852 - DNA, 20 bp, synthetic construct
  source 1..20: mol_type = other DNA
cacgcggagagccttgaccg

SEQ ID NO: 5853 - DNA, 20 bp, synthetic construct
  source 1..20: mol_type = other DNA
ggaaggcgcgaacctgttcg

SEQ ID NO: 5854 - DNA, 20 bp, synthetic construct
  source 1..20: mol_type = other DNA
caagaagaataatgcgacga

SEQ ID NO: 5855 - DNA, 20 bp, synthetic construct
  source 1..20: mol_type = other DNA
cagcactttcttctggaatg

SEQ ID NO: 5856 - DNA, 20 bp, synthetic construct
  source 1..20: mol_type = other DNA
cagaagatcagataagccaa

SEQ ID NO: 5857 - DNA, 20 bp, synthetic construct
  source 1..20: mol_type = other DNA
tattagaatcaccaagggca

SEQ ID NO: 5858 - DNA, 20 bp, synthetic construct
  source 1..20: mol_type = other DNA
atattgtactaggctcctgg

SEQ ID NO: 5859 - DNA, 20 bp, synthetic construct
  source 1..20: mol_type = other DNA
ggactttacaaaacagactc

SEQ ID NO: 5860 - DNA, 20 bp, synthetic construct
  source 1..20: mol_type = other DNA
ctgggcagttataggtccca

SEQ ID NO: 5861 - DNA, 20 bp, synthetic construct
  source 1..20: mol_type = other DNA
tgttgattctcagtgtgctg

SEQ ID NO: 5862 - DNA, 20 bp, synthetic construct
  source 1..20: mol_type = other DNA
agatcagaagttccaatgct

SEQ ID NO: 5863 - DNA, 20 bp, synthetic construct
  source 1..20: mol_type = other DNA
acccgcaggatgctgtgcac

SEQ ID NO: 5864 - DNA, 20 bp, synthetic construct
  source 1..20: mol_type = other DNA
gtgaaaacaaggaacattcc

SEQ ID NO: 5865 - DNA, 20 bp, synthetic construct
  source 1..20: mol_type = other DNA
attgtaggaatacttgcagc

SEQ ID NO: 5866 - DNA, 20 bp, synthetic construct
  source 1..20: mol_type = other DNA
attgctttgagggaatccct

SEQ ID NO: 5867 - DNA, 20 bp, synthetic construct
  source 1..20: mol_type = other DNA
atatagaaaacgagcagtgc

SEQ ID NO: 5868 - DNA, 20 bp, synthetic construct
  source 1..20: mol_type = other DNA
ccagatgttgaccacatggc

SEQ ID NO: 5869 - DNA, 20 bp, synthetic construct
  source 1..20: mol_type = other DNA
agcacagatttgattccacg

SEQ ID NO: 5870 - DNA, 20 bp, synthetic construct
  source 1..20: mol_type = other DNA
cagcttgaggtttcagtggg

SEQ ID NO: 5871 - DNA, 20 bp, synthetic construct
  source 1..20: mol_type = other DNA
gattacagaggtctgtgact

SEQ ID NO: 5872 - DNA, 20 bp, synthetic construct
  source 1..20: mol_type = other DNA
atcgcctttgagggaagact

SEQ ID NO: 5873 - DNA, 20 bp, synthetic construct
  source 1..20: mol_type = other DNA
ggatcaggaccaggatactg

SEQ ID NO: 5874 - DNA, 20 bp, synthetic construct
  source 1..20: mol_type = other DNA
cccggacaccgggctgaact

SEQ ID NO: 5875 - DNA, 20 bp, synthetic construct
  source 1..20: mol_type = other DNA
catccagtagataaagccag

SEQ ID NO: 5876 - DNA, 20 bp, synthetic construct
  source 1..20: mol_type = other DNA
aactggaaacaccctgccta

SEQ ID NO: 5877 - DNA, 20 bp, synthetic construct
  source 1..20: mol_type = other DNA
gccagctgtgagggtgtgac

SEQ ID NO: 5878 - DNA, 20 bp, synthetic construct
  source 1..20: mol_type = other DNA
ccgctgtgctgtattatgaa

SEQ ID NO: 5879 - DNA, 20 bp, synthetic construct
  source 1..20: mol_type = other DNA
ggccttgtcttttcatagga

SEQ ID NO: 5880 - DNA, 20 bp, synthetic construct
  source 1..20: mol_type = other DNA
tttggcgatatccctcatgc

SEQ ID NO: 5881 - DNA, 20 bp, synthetic construct
  source 1..20: mol_type = other DNA
acgtggaatacacctgcaaa

SEQ ID NO: 5882 - DNA, 20 bp, synthetic construct
  source 1..20: mol_type = other DNA
tgtgcctccatattagtaac

SEQ ID NO: 5883 - DNA, 20 bp, synthetic construct
  source 1..20: mol_type = other DNA
ctggcacaatcacctttgag

SEQ ID NO: 5884 - DNA, 20 bp, synthetic construct
  source 1..20: mol_type = other DNA
gcccgtcagcttttcaactg

SEQ ID NO: 5885 - DNA, 20 bp, synthetic construct
  source 1..20: mol_type = other DNA
ctcgggcttgtgactcaggt

SEQ ID NO: 5886 - DNA, 20 bp, synthetic construct
  source 1..20: mol_type = other DNA
ctgttccgacttggtttgtc

SEQ ID NO: 5887 - DNA, 20 bp, synthetic construct
  source 1..20: mol_type = other DNA
ttattatcactaagtggccc

SEQ ID NO: 5888 - DNA, 20 bp, synthetic construct
  source 1..20: mol_type = other DNA
ccagacatcatagtcagcac

SEQ ID NO: 5889 - DNA, 20 bp, synthetic construct
  source 1..20: mol_type = other DNA
tgtgattatcccagcttaag

SEQ ID NO: 5890 - DNA, 20 bp, synthetic construct
  source 1..20: mol_type = other DNA
cttaggttctgggtaaccgt

SEQ ID NO: 5891 - DNA, 20 bp, synthetic construct
  source 1..20: mol_type = other DNA
ctgtagctccaaaaagagac

SEQ ID NO: 5892 - DNA, 20 bp, synthetic construct
  source 1..20: mol_type = other DNA
agggcgcccagatgtagata

SEQ ID NO: 5893 - DNA, 20 bp, synthetic construct
  source 1..20: mol_type = other DNA
ggcattgcttgtaccatacc

SEQ ID NO: 5894 - DNA, 20 bp, synthetic construct
  source 1..20: mol_type = other DNA
tggtgtggcaggcataggat

SEQ ID NO: 5895 - DNA, 20 bp, synthetic construct
  source 1..20: mol_type = other DNA
catttgttggaagacagaca

SEQ ID NO: 5896 - DNA, 20 bp, synthetic construct
  source 1..20: mol_type = other DNA
gttttcttcaggacaaggta

SEQ ID NO: 5897 - DNA, 20 bp, synthetic construct
  source 1..20: mol_type = other DNA
gcccttgacaatgtagttgg

SEQ ID NO: 5898 - DNA, 20 bp, synthetic construct
  source 1..20: mol_type = other DNA
gtgttttggaaggtagcgtt

SEQ ID NO: 5899 - DNA, 20 bp, synthetic construct
  source 1..20: mol_type = other DNA
ccatcatgtaggttgccgca

SEQ ID NO: 5900 - DNA, 20 bp, synthetic construct
  source 1..20: mol_type = other DNA
tgtattagtgtcctgagctc

SEQ ID NO: 5901 - DNA, 20 bp, synthetic construct
  source 1..20: mol_type = other DNA
atcaccatagccaaccacaa

SEQ ID NO: 5902 - DNA, 20 bp, synthetic construct
  source 1..20: mol_type = other DNA
tgtgtagggtgtcctgaacc

SEQ ID NO: 5903 - DNA, 20 bp, synthetic construct
  source 1..20: mol_type = other DNA
acccaagccaaaactgatcc

SEQ ID NO: 5904 - DNA, 20 bp, synthetic construct
  source 1..20: mol_type = other DNA
gggactgtctaaggtgctct

SEQ ID NO: 5905 - DNA, 20 bp, synthetic construct
  source 1..20: mol_type = other DNA
acacattgtagtgggcagtg

SEQ ID NO: 5906 - DNA, 20 bp, synthetic construct
  source 1..20: mol_type = other DNA
acaaagccaaagcaccagtt

SEQ ID NO: 5907 - DNA, 20 bp, synthetic construct
  source 1..20: mol_type = other DNA
cttgtagactgtgccaaaag

SEQ ID NO: 5908 - DNA, 20 bp, synthetic construct
  source 1..20: mol_type = other DNA
agaacgcatccagtaggacc

SEQ ID NO: 5909 - DNA, 20 bp, synthetic construct
  source 1..20: mol_type = other DNA
gtcttcctcaattccaatcc

SEQ ID NO: 5910 - DNA, 20 bp, synthetic construct
  source 1..20: mol_type = other DNA
cgccctgccttgtttgcgtc

SEQ ID NO: 5911 - DNA, 20 bp, synthetic construct
  source 1..20: mol_type = other DNA
gcttcttagtgagcttttct

SEQ ID NO: 5912 - DNA, 20 bp, synthetic construct
  source 1..20: mol_type = other DNA
caggtttactctcgcagtta

SEQ ID NO: 5913 - DNA, 20 bp, synthetic construct
  source 1..20: mol_type = other DNA
ccgtaagtgatcctgtaata

SEQ ID NO: 5914 - DNA, 20 bp, synthetic construct
  source 1..20: mol_type = other DNA
aaaccctcaacggcaactgg

SEQ ID NO: 5915 - DNA, 20 bp, synthetic construct
  source 1..20: mol_type = other DNA
aatagggacaagacagatgc

SEQ ID NO: 5916 - DNA, 20 bp, synthetic construct
  source 1..20: mol_type = other DNA
tgtagaaggtatacacaacc

SEQ ID NO: 5917 - DNA, 20 bp, synthetic construct
  source 1..20: mol_type = other DNA
gtctgccttgaacacagaag

SEQ ID NO: 5918 - DNA, 20 bp, synthetic construct
  source 1..20: mol_type = other DNA
tacactgacttgccgtttca

SEQ ID NO: 5919 - DNA, 20 bp, synthetic construct
  source 1..20: mol_type = other DNA
gaaatctggaacgaatgtct

SEQ ID NO: 5920 - DNA, 20 bp, synthetic construct
  source 1..20: mol_type = other DNA
aacgacaactgagagagagg

SEQ ID NO: 5921 - DNA, 20 bp, synthetic construct
  source 1..20: mol_type = other DNA
cagtgtacaaagcttgagac

SEQ ID NO: 5922 - DNA, 20 bp, synthetic construct
  source 1..20: mol_type = other DNA
actccttccagaaacaaatg

SEQ ID NO: 5923 - DNA, 20 bp, synthetic construct
  source 1..20: mol_type = other DNA
gatctaagagaggttttgga

SEQ ID NO: 5924 - DNA, 20 bp, synthetic construct
  source 1..20: mol_type = other DNA
cttggttaacagggtgtaga

SEQ ID NO: 5925 - DNA, 20 bp, synthetic construct
  source 1..20: mol_type = other DNA
gatccctgctccgatgtaga

SEQ ID NO: 5926 - DNA, 20 bp, synthetic construct
  source 1..20: mol_type = other DNA
ggcagtgctcaaataagcct

SEQ ID NO: 5927 - DNA, 20 bp, synthetic construct
  source 1..20: mol_type = other DNA
atagttggagcgctttgtca

SEQ ID NO: 5928 - DNA, 20 bp, synthetic construct
  source 1..20: mol_type = other DNA
ggtgacaggttttccatttc

SEQ ID NO: 5929 - DNA, 20 bp, synthetic construct
  source 1..20: mol_type = other DNA
aaacactcaccgcttattca

SEQ ID NO: 5930 - DNA, 20 bp, synthetic construct
  source 1..20: mol_type = other DNA
cagcaggacgtcaaagcact

SEQ ID NO: 5931 - DNA, 20 bp, synthetic construct
  source 1..20: mol_type = other DNA
ttgtatcaagctgatcaggt

SEQ ID NO: 5932 - DNA, 20 bp, synthetic construct
  source 1..20: mol_type = other DNA
gtctgcaccctgatatgatg

SEQ ID NO: 5933 - DNA, 20 bp, synthetic construct
  source 1..20: mol_type = other DNA
caggacacctgaatctgccg

SEQ ID NO: 5934 - DNA, 20 bp, synthetic construct
  source 1..20: mol_type = other DNA
cccgttgacacggttagttt

SEQ ID NO: 5935 - DNA, 20 bp, synthetic construct
  source 1..20: mol_type = other DNA
catgacaccatggactccca

SEQ ID NO: 5936 - DNA, 20 bp, synthetic construct
  source 1..20: mol_type = other DNA
gacaaaggcaaagaagatga

SEQ ID NO: 5937 - DNA, 20 bp, synthetic construct
  source 1..20: mol_type = other DNA
tcctagagtctatagagtcg

SEQ ID NO: 5938 - DNA, 20 bp, synthetic construct
  source 1..20: mol_type = other DNA
cactcaaataccatagtgtg

SEQ ID NO: 5939 - DNA, 20 bp, synthetic construct
  source 1..20: mol_type = other DNA
agtcttgaaggcatgtgaaa

SEQ ID NO: 5940 - DNA, 20 bp, synthetic construct
  source 1..20: mol_type = other DNA
tggtctgttgatctctgagg

SEQ ID NO: 5941 - DNA, 20 bp, synthetic construct
  source 1..20: mol_type = other DNA
tgtgccttgtgcctcgaaga

SEQ ID NO: 5942 - DNA, 20 bp, synthetic construct
  source 1..20: mol_type = other DNA
tgctcatcagaatgtgggag

SEQ ID NO: 5943 - DNA, 20 bp, synthetic construct
  source 1..20: mol_type = other DNA
gttcttcaggttgaggtgtc

SEQ ID NO: 5944 - DNA, 20 bp, synthetic construct
  source 1..20: mol_type = other DNA
tgccgtcagcctctttttgg

SEQ ID NO: 5945 - DNA, 20 bp, synthetic construct
  source 1..20: mol_type = other DNA
tgagcctaaattcgtgggat

SEQ ID NO: 5946 - DNA, 20 bp, synthetic construct
  source 1..20: mol_type = other DNA
ccaggatgcttgactcacgg

SEQ ID NO: 5947 - DNA, 20 bp, synthetic construct
  source 1..20: mol_type = other DNA
tgcaggaactccttaaagct

SEQ ID NO: 5948 - DNA, 20 bp, synthetic construct
  source 1..20: mol_type = other DNA
agctagaaggaaactacgga

SEQ ID NO: 5949 - DNA, 20 bp, synthetic construct
  source 1..20: mol_type = other DNA
ctggctatagcatgagaatg

SEQ ID NO: 5950 - DNA, 20 bp, synthetic construct
  source 1..20: mol_type = other DNA
catgagattttgtggagcct

SEQ ID NO: 5951 - DNA, 20 bp, synthetic construct
  source 1..20: mol_type = other DNA
tcagatctgtgaagacacgc

SEQ ID NO: 5952 - DNA, 20 bp, synthetic construct
  source 1..20: mol_type = other DNA
gcgtggacaccttccggtag

SEQ ID NO: 5953 - DNA, 20 bp, synthetic construct
  source 1..20: mol_type = other DNA
accatcatttctcacagtca

SEQ ID NO: 5954 - DNA, 20 bp, synthetic construct
  source 1..20: mol_type = other DNA
agactctgagaagttgaggt

SEQ ID NO: 5955 - DNA, 20 bp, synthetic construct
  source 1..20: mol_type = other DNA
atccacatagatgaggtagc

SEQ ID NO: 5956 - DNA, 20 bp, synthetic construct
  source 1..20: mol_type = other DNA
tctcgcactggcacgctgag

SEQ ID NO: 5957 - DNA, 20 bp, synthetic construct
  source 1..20: mol_type = other DNA
cttcatcacagatattgctc

SEQ ID NO: 5958 - DNA, 20 bp, synthetic construct
  source 1..20: mol_type = other DNA
ctcagcaagtcttctaagtc

SEQ ID NO: 5959 - DNA, 20 bp, synthetic construct
  source 1..20: mol_type = other DNA
tggtggaacaatcagctaga

SEQ ID NO: 5960 - DNA, 20 bp, synthetic construct
  source 1..20: mol_type = other DNA
ggagatatattggttgcggg

SEQ ID NO: 5961 - DNA, 20 bp, synthetic construct
  source 1..20: mol_type = other DNA
agttctatgttgggtcctgg

SEQ ID NO: 5962 - DNA, 20 bp, synthetic construct
  source 1..20: mol_type = other DNA
gagatcaaagtcaaagtgag

SEQ ID NO: 5963 - DNA, 20 bp, synthetic construct
  source 1..20: mol_type = other DNA
ccattttgactaaccaatgc

SEQ ID NO: 5964 - DNA, 20 bp, synthetic construct
  source 1..20: mol_type = other DNA
tgaatgaacgaaggtaggtt

SEQ ID NO: 5965 - DNA, 20 bp, synthetic construct
  source 1..20: mol_type = other DNA
tgaggctgacctgtgatgat

SEQ ID NO: 5966 - DNA, 20 bp, synthetic construct
  source 1..20: mol_type = other DNA
atctttcatttgctcgatgg

SEQ ID NO: 5967 - DNA, 20 bp, synthetic construct
  source 1..20: mol_type = other DNA
tgaagagccgacagccactc

SEQ ID NO: 5968 - DNA, 20 bp, synthetic construct
  source 1..20: mol_type = other DNA
gaattgtgaagcttgcagta

SEQ ID NO: 5969 - DNA, 20 bp, synthetic construct
  source 1..20: mol_type = other DNA
ctcataatctgagattcgga

SEQ ID NO: 5970 - DNA, 20 bp, synthetic construct
  source 1..20: mol_type = other DNA
gatgggtgcatagatccctg

SEQ ID NO: 5971 - DNA, 20 bp, synthetic construct
  source 1..20: mol_type = other DNA
catttttttctcaggcctgc

SEQ ID NO: 5972 - DNA, 20 bp, synthetic construct
  source 1..20: mol_type = other DNA
tttcaggatgacatctcggc

SEQ ID NO: 5973 - DNA, 20 bp, synthetic construct
  source 1..20: mol_type = other DNA
atcatcattccacaccactg

SEQ ID NO: 5974 - DNA, 20 bp, synthetic construct
  source 1..20: mol_type = other DNA
cacttcgggtccaggatgaa

SEQ ID NO: 5975 - DNA, 20 bp, synthetic construct
  source 1..20: mol_type = other DNA
gcccatttgaatagttcaag

SEQ ID NO: 5976 - DNA, 20 bp, synthetic construct
  source 1..20: mol_type = other DNA
cagttgctgtttgtgttaga

SEQ ID NO: 5977 - DNA, 20 bp, synthetic construct
  source 1..20: mol_type = other DNA
gctaggaaagacaatggtgg

SEQ ID NO: 5978 - DNA, 20 bp, synthetic construct
  source 1..20: mol_type = other DNA
gggtcactctcaccgtgtgc

SEQ ID NO: 5979 - DNA, 20 bp, synthetic construct
  source 1..20: mol_type = other DNA
tcggtaattgacataggagc

SEQ ID NO: 5980 - DNA, 20 bp, synthetic construct
  source 1..20: mol_type = other DNA
cttgtaatctgcaaccactg

SEQ ID NO: 5981 - DNA, 20 bp, synthetic construct
  source 1..20: mol_type = other DNA
ctcaaacttgggctccataa

SEQ ID NO: 5982 - DNA, 20 bp, synthetic construct
  source 1..20: mol_type = other DNA
gtgggcgagctgagtaaagc

SEQ ID NO: 5983 - DNA, 20 bp, synthetic construct
  source 1..20: mol_type = other DNA
gaggccaaagttgttgatgc

SEQ ID NO: 5984 - DNA, 20 bp, synthetic construct
  source 1..20: mol_type = other DNA
caaagaagagcttcacatag

SEQ ID NO: 5985 - DNA, 20 bp, synthetic construct
  source 1..20: mol_type = other DNA
gcaagcacctggcatgatag

SEQ ID NO: 5986 - DNA, 20 bp, synthetic construct
  source 1..20: mol_type = other DNA
gcatcgatgtcaccatagag

SEQ ID NO: 5987 - DNA, 20 bp, synthetic construct
  source 1..20: mol_type = other DNA
cttcccagcttttgtagcca

SEQ ID NO: 5988 - DNA, 20 bp, synthetic construct
  source 1..20: mol_type = other DNA
tcctcctatcttccggattc

SEQ ID NO: 5989 - DNA, 20 bp, synthetic construct
  source 1..20: mol_type = other DNA
atgtttgacgtaggaggtgc

SEQ ID NO: 5990 - DNA, 20 bp, synthetic construct
  source 1..20: mol_type = other DNA
tagcgaccggcacgctcgct

SEQ ID NO: 5991 - DNA, 20 bp, synthetic construct
  source 1..20: mol_type = other DNA
tgaacctgctccaggaattt

SEQ ID NO: 5992 - DNA, 20 bp, synthetic construct
  source 1..20: mol_type = other DNA
ctcgtccgtgagagttttct

SEQ ID NO: 5993 - DNA, 20 bp, synthetic construct
  source 1..20: mol_type = other DNA
aaaaggtgccaggcatttta

SEQ ID NO: 5994 - DNA, 20 bp, synthetic construct
  source 1..20: mol_type = other DNA
cagctcatcacctccagtag

SEQ ID NO: 5995 - DNA, 20 bp, synthetic construct
  source 1..20: mol_type = other DNA
taagtacacacggtttccgg

SEQ ID NO: 5996 - DNA, 20 bp, synthetic construct
  source 1..20: mol_type = other DNA
aacctacagggtgtttatgg

SEQ ID NO: 5997 - DNA, 20 bp, synthetic construct
  source 1..20: mol_type = other DNA
tgtgagctttagtttcccaa

SEQ ID NO: 5998 - DNA, 20 bp, synthetic construct
  source 1..20: mol_type = other DNA
tttggatcagggattaacac

SEQ ID NO: 5999 - DNA, 20 bp, synthetic construct
  source 1..20: mol_type = other DNA
acaactttgtaacacccagg

SEQ ID NO: 6000 - DNA, 20 bp, synthetic construct
  source 1..20: mol_type = other DNA
ctcaggtgaatcggctgtgt

SEQ ID NO: 6001 - DNA, 20 bp, synthetic construct
  source 1..20: mol_type = other DNA
gcacgcgggtgacctccttg

SEQ ID NO: 6002 - DNA, 20 bp, synthetic construct
  source 1..20: mol_type = other DNA
gctgcacttgcaggagcgca

SEQ ID NO: 6003 - DNA, 20 bp, synthetic construct
  source 1..20: mol_type = other DNA
catgtctccaggaatccaac

SEQ ID NO: 6004 - DNA, 20 bp, synthetic construct
  source 1..20: mol_type = other DNA
gatagatgcagaagtactcc

SEQ ID NO: 6005 - DNA, 20 bp, synthetic construct
  source 1..20: mol_type = other DNA
agcctccggattgttaacgt

SEQ ID NO: 6006 - DNA, 20 bp, synthetic construct
  source 1..20: mol_type = other DNA
gactttatcgcagctctcag

SEQ ID NO: 6007 - DNA, 20 bp, synthetic construct
  source 1..20: mol_type = other DNA
caatcacctttcggctttta

SEQ ID NO: 6008 - DNA, 20 bp, synthetic construct
  source 1..20: mol_type = other DNA
aggaccgacacaccaatgat

SEQ ID NO: 6009 - DNA, 20 bp, synthetic construct
  source 1..20: mol_type = other DNA
ttccagagcaaatgcagcaa

SEQ ID NO: 6010 - DNA, 20 bp, synthetic construct
  source 1..20: mol_type = other DNA
ccacggcccatctgcgtcac

SEQ ID NO: 6011 - DNA, 20 bp, synthetic construct
  source 1..20: mol_type = other DNA
agctgggcagttactacaag

SEQ ID NO: 6012 - DNA, 20 bp, synthetic construct
  source 1..20: mol_type = other DNA
ggtcgacagatgccacgttt

SEQ ID NO: 6013 - DNA, 20 bp, synthetic construct
  source 1..20: mol_type = other DNA
atttaccctccgattggatt

SEQ ID NO: 6014 - DNA, 20 bp, synthetic construct
  source 1..20: mol_type = other DNA
agcagtttcaatgcaccaaa

SEQ ID NO: 6015 - DNA, 20 bp, synthetic construct
  source 1..20: mol_type = other DNA
gttcagctccgttttcacgg

SEQ ID NO: 6016 - DNA, 20 bp, synthetic construct
  source 1..20: mol_type = other DNA
tcctccagaaattcctgact

SEQ ID NO: 6017 - DNA, 20 bp, synthetic construct
  source 1..20: mol_type = other DNA
cttcgtgaaacatctccgta

SEQ ID NO: 6018 - DNA, 20 bp, synthetic construct
  source 1..20: mol_type = other DNA
acaaacaaatgctttctccg

SEQ ID NO: 6019 - DNA, 20 bp, synthetic construct
  source 1..20: mol_type = other DNA
aagataagctagtgactgtc

SEQ ID NO: 6020 - DNA, 20 bp, synthetic construct
  source 1..20: mol_type = other DNA
cagtgtggctgtttggcaac

SEQ ID NO: 6021 - DNA, 20 bp, synthetic construct
  source 1..20: mol_type = other DNA
tgagtatggaggagatgtgt

SEQ ID NO: 6022 - DNA, 20 bp, synthetic construct
  source 1..20: mol_type = other DNA
aaagctgaggtgtccatagg

SEQ ID NO: 6023 - DNA, 20 bp, synthetic construct
  source 1..20: mol_type = other DNA
gatgaaccgtggcatttcca

SEQ ID NO: 6024 - DNA, 20 bp, synthetic construct
  source 1..20: mol_type = other DNA
agcacattgtacaccagctt

SEQ ID NO: 6025 - DNA, 20 bp, synthetic construct
  source 1..20: mol_type = other DNA
tggatttccagctgtatggg

SEQ ID NO: 6026 - DNA, 20 bp, synthetic construct
  source 1..20: mol_type = other DNA
agcagaaagagacttggtac

SEQ ID NO: 6027 - DNA, 20 bp, synthetic construct
  source 1..20: mol_type = other DNA
accatccctagcctgtattg

SEQ ID NO: 6028 - DNA, 20 bp, synthetic construct
  source 1..20: mol_type = other DNA
ttctgctgcagaagcacgtt

SEQ ID NO: 6029 - DNA, 20 bp, synthetic construct
  source 1..20: mol_type = other DNA
tgcagtgtaacctcaacgct

SEQ ID NO: 6030 - DNA, 20 bp, synthetic construct
  source 1..20: mol_type = other DNA
ggcaagcatagctggcttct

SEQ ID NO: 6031 - DNA, 20 bp, synthetic construct
  source 1..20: mol_type = other DNA
accggtcactgcctcctttt

SEQ ID NO: 6032 - DNA, 20 bp, synthetic construct
  source 1..20: mol_type = other DNA
cgatcatgttcctgtagtcg

SEQ ID NO: 6033 - DNA, 20 bp, synthetic construct
  source 1..20: mol_type = other DNA
acttataagtgcacgtctac

SEQ ID NO: 6034 - DNA, 20 bp, synthetic construct
  source 1..20: mol_type = other DNA
agaggaagagaaacagtcat

SEQ ID NO: 6035 - DNA, 20 bp, synthetic construct
  source 1..20: mol_type = other DNA
gctcgcactgcacatctagg

SEQ ID NO: 6036 - DNA, 20 bp, synthetic construct
  source 1..20: mol_type = other DNA
tcacctcccaggatgtcaat

SEQ ID NO: 6037 - DNA, 20 bp, synthetic construct
  source 1..20: mol_type = other DNA
aaggccttggttttagtgat

SEQ ID NO: 6038 - DNA, 20 bp, synthetic construct
  source 1..20: mol_type = other DNA
ctccaccacttaaagaaggc

SEQ ID NO: 6039 - DNA, 20 bp, synthetic construct
  source 1..20: mol_type = other DNA
gcaactctaaacatgtgaga

SEQ ID NO: 6040 - DNA, 20 bp, synthetic construct
  source 1..20: mol_type = other DNA
tctagggttgttttgtgtgc

SEQ ID NO: 6041 - DNA, 20 bp, synthetic construct
  source 1..20: mol_type = other DNA
ctaatgctgatgcaggtaca

SEQ ID NO: 6042 - DNA, 20 bp, synthetic construct
  source 1..20: mol_type = other DNA
gtgtcttcaggattgtgact

SEQ ID NO: 6043 - DNA, 20 bp, synthetic construct
  source 1..20: mol_type = other DNA
accttctttcacagcatccc

SEQ ID NO: 6044 - DNA, 20 bp, synthetic construct
  source 1..20: mol_type = other DNA
tgtatccattcagcttgagg

SEQ ID NO: 6045 - DNA, 20 bp, synthetic construct
  source 1..20: mol_type = other DNA
taagacgttcgggtgggatc

SEQ ID NO: 6046 - DNA, 20 bp, synthetic construct
  source 1..20: mol_type = other DNA
aaatcatggccttaagcatg

SEQ ID NO: 6047 - DNA, 20 bp, synthetic construct
  source 1..20: mol_type = other DNA
gagctgggtggcatgaacta

SEQ ID NO: 6048 - DNA, 20 bp, synthetic construct
  source 1..20: mol_type = other DNA
tgatgttgaagagggcacct

SEQ ID NO: 6049 - DNA, 20 bp, synthetic construct
  source 1..20: mol_type = other DNA
tgttcagttcccttttctac

SEQ ID NO: 6050 - DNA, 20 bp, synthetic construct
  source 1..20: mol_type = other DNA
ttttcttcacggaaacaggg

SEQ ID NO: 6051 - DNA, 20 bp, synthetic construct
  source 1..20: mol_type = other DNA
agttgactttgtgcagggca

SEQ ID NO: 6052 - DNA, 20 bp, synthetic construct
  source 1..20: mol_type = other DNA
attttccaccagggaggtgt

SEQ ID NO: 6053 - DNA, 20 bp, synthetic construct
  source 1..20: mol_type = other DNA
tcagggatgagacatttaca

SEQ ID NO: 6054 - DNA, 20 bp, synthetic construct
  source 1..20: mol_type = other DNA
ggtggtgccagcacttgttt

SEQ ID NO: 6055 - DNA, 20 bp, synthetic construct
  source 1..20: mol_type = other DNA
gatgtggagatcgccactga

SEQ ID NO: 6056 - DNA, 20 bp, synthetic construct
  source 1..20: mol_type = other DNA
acttcttcacgcaggtggca

SEQ ID NO: 6057 - DNA, 20 bp, synthetic construct
  source 1..20: mol_type = other DNA
atgcgggatacctcaagttg

SEQ ID NO: 6058 - DNA, 20 bp, synthetic construct
  source 1..20: mol_type = other DNA
acatgtagaagtctcatcga

SEQ ID NO: 6059 - DNA, 20 bp, synthetic construct
  source 1..20: mol_type = other DNA
gtaaacggctcagatcttag

SEQ ID NO: 6060 - DNA, 20 bp, synthetic construct
  source 1..20: mol_type = other DNA
cagactaatccggaacattc

SEQ ID NO: 6061 - DNA, 20 bp, synthetic construct
  source 1..20: mol_type = other DNA
tcccactcgagactaatctt

SEQ ID NO: 6062 - DNA, 20 bp, synthetic construct
  source 1..20: mol_type = other DNA
aatccggacttgaatacacg

SEQ ID NO: 6063 - DNA, 20 bp, synthetic construct
  source 1..20: mol_type = other DNA
agcgaataacccaacgaccg

SEQ ID NO: 6064 - DNA, 20 bp, synthetic construct
  source 1..20: mol_type = other DNA
ttccagatgatgccatacgt

SEQ ID NO: 6065 - DNA, 20 bp, synthetic construct
  source 1..20: mol_type = other DNA
atagggtaagcctattgcaa

SEQ ID NO: 6066 - DNA, 20 bp, synthetic construct
  source 1..20: mol_type = other DNA
gggcgtgtcattcagcactt

SEQ ID NO: 6067 - DNA, 20 bp, synthetic construct
  source 1..20: mol_type = other DNA
atccactcgagacataacat

SEQ ID NO: 6068 - DNA, 20 bp, synthetic construct
  source 1..20: mol_type = other DNA
tcataggcatgtagataacc

SEQ ID NO: 6069 - DNA, 20 bp, synthetic construct
  source 1..20: mol_type = other DNA
aatccacctcgtaccgctgt

SEQ ID NO: 6070 - DNA, 20 bp, synthetic construct
  source 1..20: mol_type = other DNA
aggaggatgatgaccactag

SEQ ID NO: 6071 - DNA, 20 bp, synthetic construct
  source 1..20: mol_type = other DNA
gaggtgcagagtgtgtgcta

SEQ ID NO: 6072 - DNA, 20 bp, synthetic construct
  source 1..20: mol_type = other DNA
ttctgttgcttgggactgta

SEQ ID NO: 6073 - DNA, 20 bp, synthetic construct
  source 1..20: mol_type = other DNA
ggaactttcctctccttatg

SEQ ID NO: 6074 - DNA, 20 bp, synthetic construct
  source 1..20: mol_type = other DNA
ggtacgctaatccagtcata

SEQ ID NO: 6075 - DNA, 20 bp, synthetic construct
  source 1..20: mol_type = other DNA
aggcagcactcagcgccatg

SEQ ID NO: 6076 - DNA, 20 bp, synthetic construct
  source 1..20: mol_type = other DNA
tagtggaatagcatgctgca

SEQ ID NO: 6077 - DNA, 20 bp, synthetic construct
  source 1..20: mol_type = other DNA
gctgatccttccttaagttt

SEQ ID NO: 6078 - DNA, 20 bp, synthetic construct
  source 1..20: mol_type = other DNA
ttgtgagtgctcatcaccct

SEQ ID NO: 6079 - DNA, 20 bp, synthetic construct
  source 1..20: mol_type = other DNA
atacctagaacggccagtcc

SEQ ID NO: 6080 - DNA, 20 bp, synthetic construct
  source 1..20: mol_type = other DNA
cttgagaagatggtgcccta

SEQ ID NO: 6081 - DNA, 20 bp, synthetic construct
  source 1..20: mol_type = other DNA
taccagatacaggttgttga

SEQ ID NO: 6082 - DNA, 20 bp, synthetic construct
  source 1..20: mol_type = other DNA
tgcgcctttccctgcacgcg

SEQ ID NO: 6083 - DNA, 20 bp, synthetic construct
  source 1..20: mol_type = other DNA
tgcaagtgaaacctccaacc

SEQ ID NO: 6084 - DNA, 20 bp, synthetic construct
  source 1..20: mol_type = other DNA
cccactgctaagattcgaaa

SEQ ID NO: 6085 - DNA, 20 bp, synthetic construct
  source 1..20: mol_type = other DNA
ccaggcctggatacaagttg

SEQ ID NO: 6086 - DNA, 20 bp, synthetic construct
  source 1..20: mol_type = other DNA
ggagacatctctggtacaat

SEQ ID NO: 6087 - DNA, 20 bp, synthetic construct
  source 1..20: mol_type = other DNA
tcatatgccatgattgttcc

SEQ ID NO: 6088 - DNA, 20 bp, synthetic construct
  source 1..20: mol_type = other DNA
ggccagtgatgctgtagaaa

SEQ ID NO: 6089 - DNA, 20 bp, synthetic construct
  source 1..20: mol_type = other DNA
gaaaaataggctgtcctttg

SEQ ID NO: 6090 - DNA, 20 bp, synthetic construct
  source 1..20: mol_type = other DNA
tgtccaaacagggtttattg

SEQ ID NO: 6091 - DNA, 20 bp, synthetic construct
  source 1..20: mol_type = other DNA
cagaaagggctcacggaaat

SEQ ID NO: 6092 - DNA, 20 bp, synthetic construct
  source 1..20: mol_type = other DNA
catggatgagggaaagtatg

SEQ ID NO: 6093 - DNA, 20 bp, synthetic construct
  source 1..20: mol_type = other DNA
cacctaaggcaatcggattg

SEQ ID NO: 6094 - DNA, 20 bp, synthetic construct
  source 1..20: mol_type = other DNA
ttggcgtgattttggcgata

SEQ ID NO: 6095 - DNA, 20 bp, synthetic construct
  source 1..20: mol_type = other DNA
taccaaaatgtgacacaggc

SEQ ID NO: 6096 - DNA, 20 bp, synthetic construct
  source 1..20: mol_type = other DNA
ccactggcttgacgttattt

SEQ ID NO: 6097 - DNA, 20 bp, synthetic construct
  source 1..20: mol_type = other DNA
tgcacacatttcatgctaca

SEQ ID NO: 6098 - DNA, 20 bp, synthetic construct
  source 1..20: mol_type = other DNA
tctgatttcagatcgacctt

SEQ ID NO: 6099 - DNA, 20 bp, synthetic construct
  source 1..20: mol_type = other DNA
gagttcattttgtacatggg

SEQ ID NO: 6100 - DNA, 20 bp, synthetic construct
  source 1..20: mol_type = other DNA
ttctgtggcttcaaacaggt

SEQ ID NO: 6101 - DNA, 20 bp, synthetic construct
  source 1..20: mol_type = other DNA
ggcatcaaggtctgtgattt

SEQ ID NO: 6102 - DNA, 20 bp, synthetic construct
  source 1..20: mol_type = other DNA
atacacttcatgccaacggt

SEQ ID NO: 6103 - DNA, 20 bp, synthetic construct
  source 1..20: mol_type = other DNA
atctcccttgctgttggatt

SEQ ID NO: 6104 - DNA, 20 bp, synthetic construct
  source 1..20: mol_type = other DNA
gcactatcaccataaggccg

SEQ ID NO: 6105 - DNA, 20 bp, synthetic construct
  source 1..20: mol_type = other DNA
gggagggaccaaagtaaaag

SEQ ID NO: 6106 - DNA, 20 bp, synthetic construct
  source 1..20: mol_type = other DNA
gacccgcagatagtactggt

SEQ ID NO: 6107 - DNA, 20 bp, synthetic construct
  source 1..20: mol_type = other DNA
agtagcacattaacaaggag

SEQ ID NO: 6108 - DNA, 20 bp, synthetic construct
  source 1..20: mol_type = other DNA
agaaagatggtcttctcgtg

SEQ ID NO: 6109 - DNA, 20 bp, synthetic construct
  source 1..20: mol_type = other DNA
tccagttgtgctgattgtgt

SEQ ID NO: 6110 - DNA, 20 bp, synthetic construct
  source 1..20: mol_type = other DNA
tgagggctggattctcagtg

SEQ ID NO: 6111 - DNA, 20 bp, synthetic construct
  source 1..20: mol_type = other DNA
tgtgtcctgttgcacgaacc

SEQ ID NO: 6112 - DNA, 20 bp, synthetic construct
  source 1..20: mol_type = other DNA
tgctgcagatattaagctga

SEQ ID NO: 6113 - DNA, 20 bp, synthetic construct
  source 1..20: mol_type = other DNA
atggcctcctggacttgttt

SEQ ID NO: 6114 - DNA, 20 bp, synthetic construct
  source 1..20: mol_type = other DNA
taagccctcacgatgatggg

SEQ ID NO: 6115 - DNA, 20 bp, synthetic construct
  source 1..20: mol_type = other DNA
ccacaccttcattcctagag

SEQ ID NO: 6116 - DNA, 20 bp, synthetic construct
  source 1..20: mol_type = other DNA
agctggaagccttgttggcc

SEQ ID NO: 6117 - DNA, 20 bp, synthetic construct
  source 1..20: mol_type = other DNA
ctcatccaattctcgactcc

SEQ ID NO: 6118 - DNA, 20 bp, synthetic construct
  source 1..20: mol_type = other DNA
ctccatcagcatccatgttt

SEQ ID NO: 6119 - DNA, 20 bp, synthetic construct
  source 1..20: mol_type = other DNA
tgaggatgtcccggatgaac

SEQ ID NO: 6120 - DNA, 20 bp, synthetic construct
  source 1..20: mol_type = other DNA
ttaactctatagcctgagga

SEQ ID NO: 6121 - DNA, 20 bp, synthetic construct
  source 1..20: mol_type = other DNA
taggttctcactcgctcaga

SEQ ID NO: 6122 - DNA, 20 bp, synthetic construct
  source 1..20: mol_type = other DNA
acaactctgctccaatccgc

SEQ ID NO: 6123 - DNA, 20 bp, synthetic construct
  source 1..20: mol_type = other DNA
cagttgttctggcttgactc

SEQ ID NO: 6124 - DNA, 20 bp, synthetic construct
  source 1..20: mol_type = other DNA
atgtccacgccaactcagat

SEQ ID NO: 6125 - DNA, 20 bp, synthetic construct
  source 1..20: mol_type = other DNA
aactgcacattgggtggttg

SEQ ID NO: 6126 - DNA, 20 bp, synthetic construct
  source 1..20: mol_type = other DNA
tacattggtgattatgtcgc

SEQ ID NO: 6127 - DNA, 20 bp, synthetic construct
  source 1..20: mol_type = other DNA
gagattgtcttagctgtttg

SEQ ID NO: 6128 - DNA, 20 bp, synthetic construct
  source 1..20: mol_type = other DNA
atgcaactccttcaactacg

SEQ ID NO: 6129 - DNA, 20 bp, synthetic construct
  source 1..20: mol_type = other DNA
ggatgcagtcacctcctaaa

SEQ ID NO: 6130 - DNA, 20 bp, synthetic construct
  source 1..20: mol_type = other DNA
atgcacgcaggagtaatacc

SEQ ID NO: 6131 - DNA, 20 bp, synthetic construct
  source 1..20: mol_type = other DNA
acttccggttcgtctctacc

SEQ ID NO: 6132 - DNA, 20 bp, synthetic construct
  source 1..20: mol_type = other DNA
attctagctactgggtaagt

SEQ ID NO: 6133 - DNA, 20 bp, synthetic construct
  source 1..20: mol_type = other DNA
atgccggtacgacacttggc

SEQ ID NO: 6134 - DNA, 20 bp, synthetic construct
  source 1..20: mol_type = other DNA
cagatacatgtctatggccc

SEQ ID NO: 6135 - DNA, 20 bp, synthetic construct
  source 1..20: mol_type = other DNA
acccataaccattgacagtt

SEQ ID NO: 6136 - DNA, 20 bp, synthetic construct
  source 1..20: mol_type = other DNA
gtagggttaggtcatcaaag

SEQ ID NO: 6137 - DNA, 20 bp, synthetic construct
  source 1..20: mol_type = other DNA
gcacttcaagtttggagttg

SEQ ID NO: 6138 - DNA, 20 bp, synthetic construct
  source 1..20: mol_type = other DNA
acccagttataggaaaagac

SEQ ID NO: 6139 - DNA, 20 bp, synthetic construct
  source 1..20: mol_type = other DNA
gttttgatcttgtccagacg

SEQ ID NO: 6140 - DNA, 20 bp, synthetic construct
  source 1..20: mol_type = other DNA
gactttctggaagttgagat

SEQ ID NO: 6141 - DNA, 20 bp, synthetic construct
  source 1..20: mol_type = other DNA
aatagcgatgtgacatgtgc

SEQ ID NO: 6142 - DNA, 20 bp, synthetic construct
  source 1..20: mol_type = other DNA
catctccatgttttagccgt

SEQ ID NO: 6143 - DNA, 20 bp, synthetic construct
  source 1..20: mol_type = other DNA
ggaagttgttgtaggcgttc

SEQ ID NO: 6144 - DNA, 20 bp, synthetic construct
  source 1..20: mol_type = other DNA
gtggattcttcaccgacgcc

SEQ ID NO: 6145 - DNA, 20 bp, synthetic construct
  source 1..20: mol_type = other DNA
gcgcagtgggagaccacgtt

SEQ ID NO: 6146 - DNA, 20 bp, synthetic construct
  source 1..20: mol_type = other DNA
gtaggagtatcagagtggtg

SEQ ID NO: 6147 - DNA, 20 bp, synthetic construct
  source 1..20: mol_type = other DNA
ccacatcgggctggttgatc

SEQ ID NO: 6148 - DNA, 20 bp, synthetic construct
  source 1..20: mol_type = other DNA
cacgcagctgaagaatgtgc

SEQ ID NO: 6149 - DNA, 20 bp, synthetic construct
  source 1..20: mol_type = other DNA
gcgccctggaagcggtcaat

SEQ ID NO: 6150 - DNA, 20 bp, synthetic construct
  source 1..20: mol_type = other DNA
tccagtggacgcagtcgtag

SEQ ID NO: 6151 - DNA, 20 bp, synthetic construct
  source 1..20: mol_type = other DNA
tgtactggtactcgccatgg

SEQ ID NO: 6152 - DNA, 20 bp, synthetic construct
  source 1..20: mol_type = other DNA
ccctcggcgatacccatgct

SEQ ID NO: 6153 - DNA, 20 bp, synthetic construct
  source 1..20: mol_type = other DNA
tctgctcaggcagaaaagtc

SEQ ID NO: 6154 - DNA, 20 bp, synthetic construct
  source 1..20: mol_type = other DNA
atcagcccactctcgctgta

SEQ ID NO: 6155 - DNA, 20 bp, synthetic construct
  source 1..20: mol_type = other DNA
ggcgccctgaaatcccggac

SEQ ID NO: 6156 - DNA, 20 bp, synthetic construct
  source 1..20: mol_type = other DNA
ctgcattcagtgcttcaacc

SEQ ID NO: 6157 - DNA, 20 bp, synthetic construct
  source 1..20: mol_type = other DNA
gaaagctgcagaactgaggt

SEQ ID NO: 6158 - DNA, 20 bp, synthetic construct
  source 1..20: mol_type = other DNA
tttccttcttgcaacaagct

SEQ ID NO: 6159 - DNA, 20 bp, synthetic construct
  source 1..20: mol_type = other DNA
attccaaatccctctgcgtg

SEQ ID NO: 6160 - DNA, 20 bp, synthetic construct
  source 1..20: mol_type = other DNA
cgtggtcatagagtatgcaa

SEQ ID NO: 6161 - DNA, 20 bp, synthetic construct
  source 1..20: mol_type = other DNA
ggcaatattcccggtgttgt

SEQ ID NO: 6162 - DNA, 20 bp, synthetic construct
  source 1..20: mol_type = other DNA
ctgtattcaatggcgccacc

SEQ ID NO: 6163 - DNA, 20 bp, synthetic construct
  source 1..20: mol_type = other DNA
cttggagccaccgatcacac

SEQ ID NO: 6164 - DNA, 20 bp, synthetic construct
  source 1..20: mol_type = other DNA
tccacctcctctaatgtggg

SEQ ID NO: 6165 - DNA, 20 bp, synthetic construct
  source 1..20: mol_type = other DNA
gtaaaccttgcctatcagga

SEQ ID NO: 6166 - DNA, 20 bp, synthetic construct
  source 1..20: mol_type = other DNA
tggtcacggtcgcatgttgt

SEQ ID NO: 6167 - DNA, 20 bp, synthetic construct
  source 1..20: mol_type = other DNA
acacgtgtctaacgagtgac

SEQ ID NO: 6168 - DNA, 20 bp, synthetic construct
  source 1..20: mol_type = other DNA
gaagacaaaaattacctcgg

SEQ ID NO: 6169 - DNA, 20 bp, synthetic construct
  source 1..20: mol_type = other DNA
acgactgattcttaattccc

SEQ ID NO: 6170 - DNA, 20 bp, synthetic construct
  source 1..20: mol_type = other DNA
gtagtcacagtgccagaagt

SEQ ID NO: 6171 - DNA, 20 bp, synthetic construct
  source 1..20: mol_type = other DNA
tacaggtctacaattctagc

SEQ ID NO: 6172 - DNA, 20 bp, synthetic construct
  source 1..20: mol_type = other DNA
aaacaaaggagcaactgtgg

SEQ ID NO: 6173 - DNA, 20 bp, synthetic construct
  source 1..20: mol_type = other DNA
cagtttggatctccggaggc

SEQ ID NO: 6174 - DNA, 20 bp, synthetic construct
  source 1..20: mol_type = other DNA
ggcaatctgtctgtatatag

SEQ ID NO: 6175 - DNA, 20 bp, synthetic construct
  source 1..20: mol_type = other DNA
cgtgtaaggttcacagatca

SEQ ID NO: 6176 - DNA, 20 bp, synthetic construct
  source 1..20: mol_type = other DNA
catgaggaagacgcctccgg

SEQ ID NO: 6177 - DNA, 20 bp, synthetic construct
  source 1..20: mol_type = other DNA
cgaccctttgtactgtcaac

SEQ ID NO: 6178 - DNA, 20 bp, synthetic construct
  source 1..20: mol_type = other DNA
cacaccattgacagcatggg

SEQ ID NO: 6179 - DNA, 20 bp, synthetic construct
  source 1..20: mol_type = other DNA
agctgtttctcaaagccagt

SEQ ID NO: 6180 - DNA, 20 bp, synthetic construct
  source 1..20: mol_type = other DNA
atgccaggtgggctccgttt

SEQ ID NO: 6181 - DNA, 20 bp, synthetic construct
  source 1..20: mol_type = other DNA
aggctttatgcgagtcgttt

SEQ ID NO: 6182 - DNA, 20 bp, synthetic construct
  source 1..20: mol_type = other DNA
cccaggagacctctgaacag

SEQ ID NO: 6183 - DNA, 20 bp, synthetic construct
  source 1..20: mol_type = other DNA
ctccctttccacgatacgca

SEQ ID NO: 6184 - DNA, 20 bp, synthetic construct
  source 1..20: mol_type = other DNA
cagcatccaaggtaaaagaa

SEQ ID NO: 6185 - DNA, 20 bp, synthetic construct
  source 1..20: mol_type = other DNA
gatttcaccacttaacaggg

SEQ ID NO: 6186 - DNA, 20 bp, synthetic construct
  source 1..20: mol_type = other DNA
ctgtgctatctagaaacacc

SEQ ID NO: 6187 - DNA, 20 bp, synthetic construct
  source 1..20: mol_type = other DNA
ctaaatgaccaatccagtga

SEQ ID NO: 6188 - DNA, 20 bp, synthetic construct
  source 1..20: mol_type = other DNA
aggaatctgtgacatctcca

SEQ ID NO: 6189 - DNA, 20 bp, synthetic construct
  source 1..20: mol_type = other DNA
cacacacctttcagactaag

SEQ ID NO: 6190 - DNA, 20 bp, synthetic construct
  source 1..20: mol_type = other DNA
caaaggcggtgtgtacttcg

SEQ ID NO: 6191 - DNA, 20 bp, synthetic construct
  source 1..20: mol_type = other DNA
tgggaaatgcataagagaag

SEQ ID NO: 6192 - DNA, 20 bp, synthetic construct
  source 1..20: mol_type = other DNA
actccatttgcaacaacgga

SEQ ID NO: 6193 - DNA, 20 bp, synthetic construct
  source 1..20: mol_type = other DNA
ccgtgtgccaccacttctgc

SEQ ID NO: 6194 - DNA, 20 bp, synthetic construct
  source 1..20: mol_type = other DNA
agtcagtctgagcgacatca

SEQ ID NO: 6195 - DNA, 20 bp, synthetic construct
  source 1..20: mol_type = other DNA
aggcatgtgtcccagcgacg

SEQ ID NO: 6196 - DNA, 20 bp, synthetic construct
  source 1..20: mol_type = other DNA
ggtggcaggagcaatgatta

SEQ ID NO: 6197 - DNA, 20 bp, synthetic construct
  source 1..20: mol_type = other DNA
agccatttcactagcagcta

SEQ ID NO: 6198 - DNA, 20 bp, synthetic construct
  source 1..20: mol_type = other DNA
caggtcctatgagcagacgc

SEQ ID NO: 6199 - DNA, 20 bp, synthetic construct
  source 1..20: mol_type = other DNA
tcagggatcaccacattgtc

SEQ ID NO: 6200 - DNA, 20 bp, synthetic construct
  source 1..20: mol_type = other DNA
tccaaccaaaagtctgagcc

SEQ ID NO: 6201 - DNA, 20 bp, synthetic construct
  source 1..20: mol_type = other DNA
cagcgcgatgtcatagtcga

SEQ ID NO: 6202 - DNA, 20 bp, synthetic construct
  source 1..20: mol_type = other DNA
gctgttgtctccgcagtcgt

SEQ ID NO: 6203 - DNA, 20 bp, synthetic construct
  source 1..20: mol_type = other DNA
gaaattctctcatggatggt

SEQ ID NO: 6204 - DNA, 20 bp, synthetic construct
  source 1..20: mol_type = other DNA
tccaaagccaatacgaagac

SEQ ID NO: 6205 - DNA, 20 bp, synthetic construct
  source 1..20: mol_type = other DNA
agcttctccatttccttaga

SEQ ID NO: 6206 - DNA, 20 bp, synthetic construct
  source 1..20: mol_type = other DNA
ccctcggactcgttcacgag

SEQ ID NO: 6207 - DNA, 20 bp, synthetic construct
  source 1..20: mol_type = other DNA
gctggcacggcacactggtt

SEQ ID NO: 6208 - DNA, 20 bp, synthetic construct
  source 1..20: mol_type = other DNA
aaatccagcatagtcatcgt

SEQ ID NO: 6209 - DNA, 20 bp, synthetic construct
  source 1..20: mol_type = other DNA
tctctgtcatagtcatactg

SEQ ID NO: 6210 - DNA, 20 bp, synthetic construct
  source 1..20: mol_type = other DNA
agggacggtgtccaatgtag

SEQ ID NO: 6211 - DNA, 20 bp, synthetic construct
  source 1..20: mol_type = other DNA
ctgtcttccaatttatccac

SEQ ID NO: 6212 - DNA, 20 bp, synthetic construct
  source 1..20: mol_type = other DNA
gcttgaagacagtggtacac

SEQ ID NO: 6213 - DNA, 20 bp, synthetic construct
  source 1..20: mol_type = other DNA
atgggagtgataaattcctc

SEQ ID NO: 6214 - DNA, 20 bp, synthetic construct
  source 1..20: mol_type = other DNA
tcttagctgtccatcttgtt

SEQ ID NO: 6215 - DNA, 20 bp, synthetic construct
  source 1..20: mol_type = other DNA
gctctagatacatatgcact

SEQ ID NO: 6216 - DNA, 20 bp, synthetic construct
  source 1..20: mol_type = other DNA
tctagaagatatctgtggtc

SEQ ID NO: 6217 - DNA, 20 bp, synthetic construct
  source 1..20: mol_type = other DNA
atatcgcaaaggctatctcc

SEQ ID NO: 6218 - DNA, 20 bp, synthetic construct
  source 1..20: mol_type = other DNA
ccgcaggtaatcacctgtgc

SEQ ID NO: 6219 - DNA, 20 bp, synthetic construct
  source 1..20: mol_type = other DNA
cgagtaatagcgtggactac

SEQ ID NO: 6220 - DNA, 20 bp, synthetic construct
  source 1..20: mol_type = other DNA
tctcattttagggaaggagc

SEQ ID NO: 6221 - DNA, 20 bp, synthetic construct
  source 1..20: mol_type = other DNA
atcctgagagtcctcgccag

SEQ ID NO: 6222 - DNA, 20 bp, synthetic construct
  source 1..20: mol_type = other DNA
ggtaatcctctgaagagact

SEQ ID NO: 6223 - DNA, 20 bp, synthetic construct
  source 1..20: mol_type = other DNA
cccaggctttgttgctatat

SEQ ID NO: 6224 - DNA, 20 bp, synthetic construct
  source 1..20: mol_type = other DNA
tgcacaggacctcaatgagg

SEQ ID NO: 6225 - DNA, 20 bp, synthetic construct
  source 1..20: mol_type = other DNA
tggtcacgactatgcgaatc

SEQ ID NO: 6226 - DNA, 20 bp, synthetic construct
  source 1..20: mol_type = other DNA
gaagttgtggatagcttctg

SEQ ID NO: 6227 - DNA, 20 bp, synthetic construct
  source 1..20: mol_type = other DNA
ctggagtttttagcagagct

SEQ ID NO: 6228 - DNA, 20 bp, synthetic construct
  source 1..20: mol_type = other DNA
agccacaaattgatctggtg

SEQ ID NO: 6229 - DNA, 20 bp, synthetic construct
  source 1..20: mol_type = other DNA
tgcctgaccatcaaaaggtc

SEQ ID NO: 6230 - DNA, 20 bp, synthetic construct
  source 1..20: mol_type = other DNA
catccatgagggcattaccg

SEQ ID NO: 6231 - DNA, 20 bp, synthetic construct
  source 1..20: mol_type = other DNA
caaggcgccatccctgttgg

SEQ ID NO: 6232 - DNA, 20 bp, synthetic construct
  source 1..20: mol_type = other DNA
caagacctgaaagcagtacg

SEQ ID NO: 6233 - DNA, 20 bp, synthetic construct
  source 1..20: mol_type = other DNA
gtttcagccaaacggccggc

SEQ ID NO: 6234 - DNA, 20 bp, synthetic construct
  source 1..20: mol_type = other DNA
actgagtaggcagcattttt

SEQ ID NO: 6235 - DNA, 20 bp, synthetic construct
  source 1..20: mol_type = other DNA
tctaaacttgagttgcctga

SEQ ID NO: 6236 - DNA, 20 bp, synthetic construct
  source 1..20: mol_type = other DNA
gagcagttcacatctatatg

SEQ ID NO: 6237 - DNA, 20 bp, synthetic construct
  source 1..20: mol_type = other DNA
catcatggattctccggatg

SEQ ID NO: 6238 - DNA, 20 bp, synthetic construct
  source 1..20: mol_type = other DNA
gaagattactgctgccaact

SEQ ID NO: 6239 - DNA, 20 bp, synthetic construct
  source 1..20: mol_type = other DNA
tgcgatccacgtctgtgaca

SEQ ID NO: 6240 - DNA, 20 bp, synthetic construct
  source 1..20: mol_type = other DNA
ctttctagtttccggtcatc

SEQ ID NO: 6241 - DNA, 20 bp, synthetic construct
  source 1..20: mol_type = other DNA
ctctttggttcttctatccg

SEQ ID NO: 6242 - DNA, 20 bp, synthetic construct
  source 1..20: mol_type = other DNA
tgatgctcatcatcgctttg

SEQ ID NO: 6243 - DNA, 20 bp, synthetic construct
  source 1..20: mol_type = other DNA
catcccttttgttcacactg

SEQ ID NO: 6244 - DNA, 20 bp, synthetic construct
  source 1..20: mol_type = other DNA
aatcttcttcgcccgaatgt

SEQ ID NO: 6245 - DNA, 20 bp, synthetic construct
  source 1..20: mol_type = other DNA
ttttcggttgttgctgatct

SEQ ID NO: 6246 - DNA, 20 bp, synthetic construct
  source 1..20: mol_type = other DNA
cagtactgtttgacaaaccg

SEQ ID NO: 6247 - DNA, 20 bp, synthetic construct
  source 1..20: mol_type = other DNA
ctgctttctttttagcaggt

SEQ ID NO: 6248 - DNA, 20 bp, synthetic construct
  source 1..20: mol_type = other DNA
cacattagagacttcaggaa

SEQ ID NO: 6249 - DNA, 20 bp, synthetic construct
  source 1..20: mol_type = other DNA
tcatcaggtaaaggtaaccg

SEQ ID NO: 6250 - DNA, 20 bp, synthetic construct
  source 1..20: mol_type = other DNA
tgcaccatgtggaaacgctc

SEQ ID NO: 6251 - DNA, 20 bp, synthetic construct
  source 1..20: mol_type = other DNA
ttcagttcctgtttcaaggt

SEQ ID NO: 6252 - DNA, 20 bp, synthetic construct
  source 1..20: mol_type = other DNA
ttatattctcaacccgggcg

SEQ ID NO: 6253 - DNA, 20 bp, synthetic construct
  source 1..20: mol_type = other DNA
aagaaagggaatgaccacgg

SEQ ID NO: 6254 - DNA, 20 bp, synthetic construct
  source 1..20: mol_type = other DNA
gccacacagctgaggacgaa

SEQ ID NO: 6255 - DNA, 20 bp, synthetic construct
  source 1..20: mol_type = other DNA
cttacagtatagagggtggt

SEQ ID NO: 6256 - DNA, 20 bp, synthetic construct
  source 1..20: mol_type = other DNA
tgttctgatcaggtagagaa

SEQ ID NO: 6257 - DNA, 20 bp, synthetic construct
  source 1..20: mol_type = other DNA
tcagcacagctgttagtgtt

SEQ ID NO: 6258 - DNA, 20 bp, synthetic construct
  source 1..20: mol_type = other DNA
atgctccctccttctcggag

SEQ ID NO: 6259 - DNA, 20 bp, synthetic construct
  source 1..20: mol_type = other DNA
tcagaaatacaactgcttgc

SEQ ID NO: 6260 - DNA, 20 bp, synthetic construct
  source 1..20: mol_type = other DNA
gtggcactgctttaattgct

SEQ ID NO: 6261 - DNA, 20 bp, synthetic construct
  source 1..20: mol_type = other DNA
agctagagagagttggcgtc

SEQ ID NO: 6262 - DNA, 20 bp, synthetic construct
  source 1..20: mol_type = other DNA
ctcattcagctctcggaaca

SEQ ID NO: 6263 - DNA, 20 bp, synthetic construct
  source 1..20: mol_type = other DNA
caaaggcagtgtagacttta

SEQ ID NO: 6264 - DNA, 20 bp, synthetic construct
  source 1..20: mol_type = other DNA
tagactgtgatgtggtaggc

SEQ ID NO: 6265 - DNA, 20 bp, synthetic construct
  source 1..20: mol_type = other DNA
ccacattattttcctggtac

SEQ ID NO: 6266 - DNA, 20 bp, synthetic construct
  source 1..20: mol_type = other DNA
agggagtgttccaagagctg

SEQ ID NO: 6267 - DNA, 20 bp, synthetic construct
  source 1..20: mol_type = other DNA
gcctctgcaccgagtcatcg

SEQ ID NO: 6268 - DNA, 20 bp, synthetic construct
  source 1..20: mol_type = other DNA
aggacctcaaagtcattcta

SEQ ID NO: 6269 - DNA, 20 bp, synthetic construct
  source 1..20: mol_type = other DNA
gagctgtttggttcttgact

SEQ ID NO: 6270 - DNA, 20 bp, synthetic construct
  source 1..20: mol_type = other DNA
gtgcccaaaggcacaaagca

SEQ ID NO: 6271 - DNA, 20 bp, synthetic construct
  source 1..20: mol_type = other DNA
ctgagaagctggaaatgaga

SEQ ID NO: 6272 - DNA, 20 bp, synthetic construct
  source 1..20: mol_type = other DNA
gagccctccaaactgatctg

SEQ ID NO: 6273 - DNA, 20 bp, synthetic construct
  source 1..20: mol_type = other DNA
cattttctgcatggctttct

SEQ ID NO: 6274 - DNA, 20 bp, synthetic construct
  source 1..20: mol_type = other DNA
gataagcaggtctccaactg

SEQ ID NO: 6275 - DNA, 20 bp, synthetic construct
  source 1..20: mol_type = other DNA
tcttatgcaagcatgcaagc

SEQ ID NO: 6276 - DNA, 20 bp, synthetic construct
  source 1..20: mol_type = other DNA
tccgtggccgacatggagat

SEQ ID NO: 6277 - DNA, 20 bp, synthetic construct
  source 1..20: mol_type = other DNA
ccgtgtctcgatggtcttga

SEQ ID NO: 6278 - DNA, 20 bp, synthetic construct
  source 1..20: mol_type = other DNA
gagacaagatctctgctatt

SEQ ID NO: 6279 - DNA, 20 bp, synthetic construct
  source 1..20: mol_type = other DNA
gggctctgctcaatgtcttt

SEQ ID NO: 6280 - DNA, 20 bp, synthetic construct
  source 1..20: mol_type = other DNA
cttcctaggaatcgtgggca

SEQ ID NO: 6281 - DNA, 20 bp, synthetic construct
  source 1..20: mol_type = other DNA
cactcacatccgtctcaagg

SEQ ID NO: 6282 - DNA, 20 bp, synthetic construct
  source 1..20: mol_type = other DNA
ggtttatgaaatccaggatg

SEQ ID NO: 6283 - DNA, 20 bp, synthetic construct
  source 1..20: mol_type = other DNA
ttgtgcattaaccagagctt

SEQ ID NO: 6284 - DNA, 20 bp, synthetic construct
  source 1..20: mol_type = other DNA
agagcccactgtgttgatgc

SEQ ID NO: 6285 - DNA, 20 bp, synthetic construct
  source 1..20: mol_type = other DNA
ctgcagtgttgatgcattcg

SEQ ID NO: 6286 - DNA, 20 bp, synthetic construct
  source 1..20: mol_type = other DNA
catctagcaggtagttatag

SEQ ID NO: 6287 - DNA, 20 bp, synthetic construct
  source 1..20: mol_type = other DNA
cgccacggtggaagtagtct

SEQ ID NO: 6288 - DNA, 20 bp, synthetic construct
  source 1..20: mol_type = other DNA
ttggaggagtaatgatagtc

SEQ ID NO: 6289 - DNA, 20 bp, synthetic construct
  source 1..20: mol_type = other DNA
aaagcacagaaaacctcaag

SEQ ID NO: 6290 - DNA, 20 bp, synthetic construct
  source 1..20: mol_type = other DNA
cagtatcaaattacccttcc

SEQ ID NO: 6291 - DNA, 20 bp, synthetic construct
  source 1..20: mol_type = other DNA
gaagctgtaacagatgagat

SEQ ID NO: 6292 - DNA, 20 bp, synthetic construct
  source 1..20: mol_type = other DNA
gattagacttgaacacgtgt

SEQ ID NO: 6293 - DNA, 20 bp, synthetic construct
  source 1..20: mol_type = other DNA
ggctgtgtcgagctgtaggg

SEQ ID NO: 6294 - DNA, 20 bp, synthetic construct
  source 1..20: mol_type = other DNA
cagcagtcttccctgatttt

SEQ ID NO: 6295 - DNA, 20 bp, synthetic construct
  source 1..20: mol_type = other DNA
aaagtacctccattcgggta

SEQ ID NO: 6296 - DNA, 20 bp, synthetic construct
  source 1..20: mol_type = other DNA
attcagagacttgtcatggc

SEQ ID NO: 6297 - DNA, 20 bp, synthetic construct
  source 1..20: mol_type = other DNA
gatgcactatggacaagaat

SEQ ID NO: 6298 - DNA, 20 bp, synthetic construct
  source 1..20: mol_type = other DNA
tggcacttgggtagctttca

SEQ ID NO: 6299 - DNA, 20 bp, synthetic construct
  source 1..20: mol_type = other DNA
tttggcatgagtgtgcaaca

SEQ ID NO: 6300 - DNA, 20 bp, synthetic construct
  source 1..20: mol_type = other DNA
ccttctgctgattcttgttt

SEQ ID NO: 6301 - DNA, 20 bp, synthetic construct
  source 1..20: mol_type = other DNA
ttacttttccaaggacggtt

SEQ ID NO: 6302 - DNA, 20 bp, synthetic construct
  source 1..20: mol_type = other DNA
gatcgcacacatttgtcgtg

SEQ ID NO: 6303 - DNA, 20 bp, synthetic construct
  source 1..20: mol_type = other DNA
ttactgtcacacgcttttgg

SEQ ID NO: 6304 - DNA, 20 bp, synthetic construct
  source 1..20: mol_type = other DNA
gcatcaactttgtggccaat

SEQ ID NO: 6305 - DNA, 20 bp, synthetic construct
  source 1..20: mol_type = other DNA
gcaccaaaacaaacttttgc

SEQ ID NO: 6306 - DNA, 20 bp, synthetic construct
  source 1..20: mol_type = other DNA
acatgtcttcacattcacct

SEQ ID NO: 6307 - DNA, 20 bp, synthetic construct
  source 1..20: mol_type = other DNA
aatctgatcgaaagtctcgt

SEQ ID NO: 6308 - DNA, 20 bp, synthetic construct
  source 1..20: mol_type = other DNA
ccggcccaacttgctgaagt

SEQ ID NO: 6309 - DNA, 20 bp, synthetic construct
  source 1..20: mol_type = other DNA
ctcttctgcaagatttgtcg

SEQ ID NO: 6310 - DNA, 20 bp, synthetic construct
  source 1..20: mol_type = other DNA
aaagggaggatgcactttgg

SEQ ID NO: 6311 - DNA, 20 bp, synthetic construct
  source 1..20: mol_type = other DNA
gggtcgtggtagtctccata

SEQ ID NO: 6312 - DNA, 20 bp, synthetic construct
  source 1..20: mol_type = other DNA
ggctgatttccatgccacgc

SEQ ID NO: 6313 - DNA, 20 bp, synthetic construct
  source 1..20: mol_type = other DNA
agctctcttcttcagacatg

SEQ ID NO: 6314 - DNA, 20 bp, synthetic construct
  source 1..20: mol_type = other DNA
tgtgggtgcaaaagtattct

SEQ ID NO: 6315 - DNA, 20 bp, synthetic construct
  source 1..20: mol_type = other DNA
ggaagtttagggtatatggc

SEQ ID NO: 6316 - DNA, 20 bp, synthetic construct
  source 1..20: mol_type = other DNA
aaggctgattttcctggtgt

SEQ ID NO: 6317 - DNA, 20 bp, synthetic construct
  source 1..20: mol_type = other DNA
catttatatgtccctgagtc

SEQ ID NO: 6318 - DNA, 20 bp, synthetic construct
  source 1..20: mol_type = other DNA
agaggtgacagggacttaaa

SEQ ID NO: 6319 - DNA, 20 bp, synthetic construct
  source 1..20: mol_type = other DNA
ccagtccaggagcctaatga

SEQ ID NO: 6320 - DNA, 20 bp, synthetic construct
  source 1..20: mol_type = other DNA
ctgcacgcccttctcatagg

SEQ ID NO: 6321 - DNA, 20 bp, synthetic construct
  source 1..20: mol_type = other DNA
gcagtagttattatgtggcc

SEQ ID NO: 6322 - DNA, 20 bp, synthetic construct
  source 1..20: mol_type = other DNA
gtccacagatggacttttta

SEQ ID NO: 6323 - DNA, 20 bp, synthetic construct
  source 1..20: mol_type = other DNA
gctcttgacagtggtacttc

SEQ ID NO: 6324 - DNA, 20 bp, synthetic construct
  source 1..20: mol_type = other DNA
ttcccagacatttactcaag

SEQ ID NO: 6325 - DNA, 20 bp, synthetic construct
  source 1..20: mol_type = other DNA
gaaaaagggaaaatggcctg

SEQ ID NO: 6326 - DNA, 20 bp, synthetic construct
  source 1..20: mol_type = other DNA
ctgctgtttgttttctcgtt

SEQ ID NO: 6327 - DNA, 20 bp, synthetic construct
  source 1..20: mol_type = other DNA
gtggagaacgggtgtccaga

SEQ ID NO: 6328 - DNA, 20 bp, synthetic construct
  source 1..20: mol_type = other DNA
ggcagaaagtcgcagtatcg

SEQ ID NO: 6329 - DNA, 20 bp, synthetic construct
  source 1..20: mol_type = other DNA
cacatgagcgacaaactcaa

SEQ ID NO: 6330 - DNA, 20 bp, synthetic construct
  source 1..20: mol_type = other DNA
ccagcagcagaaagtccagc

SEQ ID NO: 6331 - DNA, 20 bp, synthetic construct
  source 1..20: mol_type = other DNA
tccttcttcacagtcaaatg

SEQ ID NO: 6332 - DNA, 20 bp, synthetic construct
  source 1..20: mol_type = other DNA
ggcaggtgaatgtctcggga

SEQ ID NO: 6333 - DNA, 20 bp, synthetic construct
  source 1..20: mol_type = other DNA
aaattgttctaggtcactgc

SEQ ID NO: 6334 - DNA, 20 bp, synthetic construct
  source 1..20: mol_type = other DNA
ctccatgttggacattacct

SEQ ID NO: 6335 - DNA, 20 bp, synthetic construct
  source 1..20: mol_type = other DNA
tcctaatgtatagtaggcct

SEQ ID NO: 6336 - DNA, 20 bp, synthetic construct
  source 1..20: mol_type = other DNA
ggttagtcgtttgactttgg

SEQ ID NO: 6337 - DNA, 20 bp, synthetic construct
  source 1..20: mol_type = other DNA
gaaggttgtagttaagtacc

SEQ ID NO: 6338 - DNA, 20 bp, synthetic construct
  source 1..20: mol_type = other DNA
gtagaatctgttctcattgg

SEQ ID NO: 6339 - DNA, 20 bp, synthetic construct
  source 1..20: mol_type = other DNA
tgccctcgtccttgctagtg

SEQ ID NO: 6340 - DNA, 20 bp, synthetic construct
  source 1..20: mol_type = other DNA
gggagccggtggcataattt

SEQ ID NO: 6341 - DNA, 20 bp, synthetic construct
  source 1..20: mol_type = other DNA
cctgcgtcacactgctcaaa

SEQ ID NO: 6342 - DNA, 20 bp, synthetic construct
  source 1..20: mol_type = other DNA
tacacatcgtaagtttcctg

SEQ ID NO: 6343 - DNA, 20 bp, synthetic construct
  source 1..20: mol_type = other DNA
agggccatcttaacattgag

SEQ ID NO: 6344 - DNA, 20 bp, synthetic construct
  source 1..20: mol_type = other DNA
ctcgacgcgggctttgtcgt

SEQ ID NO: 6345 - DNA, 20 bp, synthetic construct
  source 1..20: mol_type = other DNA
gtcatctggatgaccaaggg

SEQ ID NO: 6346 - DNA, 20 bp, synthetic construct
  source 1..20: mol_type = other DNA
acactttgtctctgtcttct

SEQ ID NO: 6347 - DNA, 20 bp, synthetic construct
  source 1..20: mol_type = other DNA
tagttactgccacatatctg

SEQ ID NO: 6348 - DNA, 20 bp, synthetic construct
  source 1..20: mol_type = other DNA
catctgacagccttgtgccc

SEQ ID NO: 6349 - DNA, 20 bp, synthetic construct
  source 1..20: mol_type = other DNA
tgcagctctttgtagaggac

SEQ ID NO: 6350 - DNA, 20 bp, synthetic construct
  source 1..20: mol_type = other DNA
ggcaagggcgacgaagccac

SEQ ID NO: 6351 - DNA, 20 bp, synthetic construct
  source 1..20: mol_type = other DNA
tagtgcactctctgactcta

SEQ ID NO: 6352 - DNA, 20 bp, synthetic construct
  source 1..20: mol_type = other DNA
tgctgtgtggtagaatctgg

SEQ ID NO: 6353 - DNA, 20 bp, synthetic construct
  source 1..20: mol_type = other DNA
ttctgataaaccgagaacga

SEQ ID NO: 6354 - DNA, 20 bp, synthetic construct
  source 1..20: mol_type = other DNA
attacttagatgctgcatgc

SEQ ID NO: 6355 - DNA, 20 bp, synthetic construct
  source 1..20: mol_type = other DNA
cccagtggatcgggtgtaaa

SEQ ID NO: 6356 - DNA, 20 bp, synthetic construct
  source 1..20: mol_type = other DNA
gaagcgtttggcaatgtgct

SEQ ID NO: 6357 - DNA, 20 bp, synthetic construct
  source 1..20: mol_type = other DNA
gatggccttgttgcgctcaa

SEQ ID NO: 6358 - DNA, 20 bp, synthetic construct
  source 1..20: mol_type = other DNA
gggctgacaaaaggttaagg

SEQ ID NO: 6359 - DNA, 20 bp, synthetic construct
  source 1..20: mol_type = other DNA
ttcggagaagttgcagacgc

SEQ ID NO: 6360 - DNA, 20 bp, synthetic construct
  source 1..20: mol_type = other DNA
gcatctcggagcgctagggt

SEQ ID NO: 6361 - DNA, 20 bp, synthetic construct
  source 1..20: mol_type = other DNA
cctggcaagaaacgctgtca

SEQ ID NO: 6362 - DNA, 20 bp, synthetic construct
  source 1..20: mol_type = other DNA
gctactcttgccaacagtgc

SEQ ID NO: 6363 - DNA, 20 bp, synthetic construct
  source 1..20: mol_type = other DNA
ggcccacacatacagcttgg

SEQ ID NO: 6364 - DNA, 20 bp, synthetic construct
  source 1..20: mol_type = other DNA
gccaggttgttggtgtgctt

SEQ ID NO: 6365 - DNA, 20 bp, synthetic construct
  source 1..20: mol_type = other DNA
cttgaatctcccgagttaat

SEQ ID NO: 6366 - DNA, 20 bp, synthetic construct
  source 1..20: mol_type = other DNA
ctttcatcccaatctcactg

SEQ ID NO: 6367 - DNA, 20 bp, synthetic construct
  source 1..20: mol_type = other DNA
gttgtaaatgcttcatcctg

SEQ ID NO: 6368 - DNA, 20 bp, synthetic construct
  source 1..20: mol_type = other DNA
actgagtagactatgtgcct

SEQ ID NO: 6369 - DNA, 20 bp, synthetic construct
  source 1..20: mol_type = other DNA
ttgcttctggaaaggaaact

SEQ ID NO: 6370 - DNA, 20 bp, synthetic construct
  source 1..20: mol_type = other DNA
tgacggcagcgctgccgaaa

SEQ ID NO: 6371 - DNA, 20 bp, synthetic construct
  source 1..20: mol_type = other DNA
gcctttctatgctggtcaca

SEQ ID NO: 6372 - DNA, 20 bp, synthetic construct
  source 1..20: mol_type = other DNA
tgctcttctcattgtctagg

SEQ ID NO: 6373 - DNA, 20 bp, synthetic construct
  source 1..20: mol_type = other DNA
gatattgctttgagggaatc

SEQ ID NO: 6374 - DNA, 20 bp, synthetic construct
  source 1..20: mol_type = other DNA
atgctattttccaacttgcc

SEQ ID NO: 6375 - DNA, 20 bp, synthetic construct
  source 1..20: mol_type = other DNA
acttttactcacaggatggt

SEQ ID NO: 6376 - DNA, 20 bp, synthetic construct
  source 1..20: mol_type = other DNA
acactgttaaacaggaggaa

SEQ ID NO: 6377 - DNA, 20 bp, synthetic construct
  source 1..20: mol_type = other DNA
cacagcatccctatgagata

SEQ ID NO: 6378 - DNA, 20 bp, synthetic construct
  source 1..20: mol_type = other DNA
tcacttaggataggagaaga

SEQ ID NO: 6379 - DNA, 20 bp, synthetic construct
  source 1..20: mol_type = other DNA
gcttcctgggagaaaattgt

SEQ ID NO: 6380 - DNA, 20 bp, synthetic construct
  source 1..20: mol_type = other DNA
ggtgagctaaggccaagcta

SEQ ID NO: 6381 - DNA, 20 bp, synthetic construct
  source 1..20: mol_type = other DNA
gatgagtcccgaaagcagca

SEQ ID NO: 6382 - DNA, 20 bp, synthetic construct
  source 1..20: mol_type = other DNA
cctaaaagggttgtgatagg

SEQ ID NO: 6383 - DNA, 20 bp, synthetic construct
  source 1..20: mol_type = other DNA
cccagcaggcatttttgtag

SEQ ID NO: 6384 - DNA, 20 bp, synthetic construct
  source 1..20: mol_type = other DNA
gcagagcacatttacggaga

SEQ ID NO: 6385 - DNA, 20 bp, synthetic construct
  source 1..20: mol_type = other DNA
ggtttcggttctccactgtg

SEQ ID NO: 6386 - DNA, 20 bp, synthetic construct
  source 1..20: mol_type = other DNA
ttgactcgaagcttcccgat

SEQ ID NO: 6387 - DNA, 20 bp, synthetic construct
  source 1..20: mol_type = other DNA
gcggcctccgtccgagagat

SEQ ID NO: 6388 - DNA, 20 bp, synthetic construct
  source 1..20: mol_type = other DNA
gtagcagggattctgtctgt

SEQ ID NO: 6389 - DNA, 20 bp, synthetic construct
  source 1..20: mol_type = other DNA
cacgatattttagctcgatg

SEQ ID NO: 6390 - DNA, 20 bp, synthetic construct
  source 1..20: mol_type = other DNA
ggcacctgacacagaagaag

SEQ ID NO: 6391 - DNA, 20 bp, synthetic construct
  source 1..20: mol_type = other DNA
cggtgtgattaagcctctgg

SEQ ID NO: 6392 - DNA, 20 bp, synthetic construct
  source 1..20: mol_type = other DNA
tgcacaccacgaggcagatc

SEQ ID NO: 6393 - DNA, 20 bp, synthetic construct
  source 1..20: mol_type = other DNA
tgggcagttgctcattgttg

SEQ ID NO: 6394 - DNA, 20 bp, synthetic construct
  source 1..20: mol_type = other DNA
gcgccaccaggtgacgttgg

SEQ ID NO: 6395 - DNA, 20 bp, synthetic construct
  source 1..20: mol_type = other DNA
gaaattgaggtatggacact

SEQ ID NO: 6396 - DNA, 20 bp, synthetic construct
  source 1..20: mol_type = other DNA
accttcagatcttttcagcc

SEQ ID NO: 6397 - DNA, 20 bp, synthetic construct
  source 1..20: mol_type = other DNA
tttataagagttgcgaggcc

SEQ ID NO: 6398 - DNA, 20 bp, synthetic construct
  source 1..20: mol_type = other DNA
actcatccgtgtgtctgtgc

SEQ ID NO: 6399 - DNA, 20 bp, synthetic construct
  source 1..20: mol_type = other DNA
cctcaaaaggaaggatctca

SEQ ID NO: 6400 - DNA, 20 bp, synthetic construct
  source 1..20: mol_type = other DNA
gtctctgggctttagcctcc

SEQ ID NO: 6401 - DNA, 20 bp, synthetic construct
  source 1..20: mol_type = other DNA
cccattataaagacagcaga

SEQ ID NO: 6402 - DNA, 20 bp, synthetic construct
  source 1..20: mol_type = other DNA
cctagttagtgatagcattc

SEQ ID NO: 6403 - DNA, 20 bp, synthetic construct
  source 1..20: mol_type = other DNA
ttgtcacataaatggctggg

SEQ ID NO: 6404 - DNA, 20 bp, synthetic construct
  source 1..20: mol_type = other DNA
aagttaacatcaacgctgct

SEQ ID NO: 6405 - DNA, 20 bp, synthetic construct
  source 1..20: mol_type = other DNA
acttgatttccactggaggt

SEQ ID NO: 6406 - DNA, 20 bp, synthetic construct
  source 1..20: mol_type = other DNA
acaacctttagcatcactgg

SEQ ID NO: 6407 - DNA, 20 bp, synthetic construct
  source 1..20: mol_type = other DNA
ttgtgtccctgtgcttttgg

SEQ ID NO: 6408 - DNA, 20 bp, synthetic construct
  source 1..20: mol_type = other DNA
gagcagtggagtattggtta

SEQ ID NO: 6409 - DNA, 20 bp, synthetic construct
  source 1..20: mol_type = other DNA
gatgtcatcttgctgcacgt

SEQ ID NO: 6410 - DNA, 20 bp, synthetic construct
  source 1..20: mol_type = other DNA
gggactcatggaaaacatca

SEQ ID NO: 6411 - DNA, 20 bp, synthetic construct
  source 1..20: mol_type = other DNA
tggtctgtggcacggttctc

SEQ ID NO: 6412 - DNA, 20 bp, synthetic construct
  source 1..20: mol_type = other DNA
caatctgatgggatctagga

SEQ ID NO: 6413 - DNA, 20 bp, synthetic construct
  source 1..20: mol_type = other DNA
ccgcatctgcgcctggttgg

SEQ ID NO: 6414 - DNA, 20 bp, synthetic construct
  source 1..20: mol_type = other DNA
tggcgtctcggcccgagaac

SEQ ID NO: 6415 - DNA, 20 bp, synthetic construct
  source 1..20: mol_type = other DNA
gttggagattcatgagaacc

SEQ ID NO: 6416 - DNA, 20 bp, synthetic construct
  source 1..20: mol_type = other DNA
gctgggtcaggtaagcttca

SEQ ID NO: 6417 - DNA, 20 bp, synthetic construct
  source 1..20: mol_type = other DNA
tcaactccaggtttaaggcc

SEQ ID NO: 6418 - DNA, 20 bp, synthetic construct
  source 1..20: mol_type = other DNA
ggagcaaggttgatttcttt

SEQ ID NO: 6419 - DNA, 20 bp, synthetic construct
  source 1..20: mol_type = other DNA
agagaccctgttaaataggg

SEQ ID NO: 6420 - DNA, 20 bp, synthetic construct
  source 1..20: mol_type = other DNA
tccggctcccggcgtttctc

SEQ ID NO: 6421 - DNA, 20 bp, synthetic construct
  source 1..20: mol_type = other DNA
tgccaggtcgtagtactcag

SEQ ID NO: 6422 - DNA, 20 bp, synthetic construct
  source 1..20: mol_type = other DNA
gttctcttgggcttacttcc

SEQ ID NO: 6423 - DNA, 20 bp, synthetic construct
  source 1..20: mol_type = other DNA
tccagacaaatatgcacacg

SEQ ID NO: 6424 - DNA, 20 bp, synthetic construct
  source 1..20: mol_type = other DNA
tccctggttattgagtgagc

SEQ ID NO: 6425 - DNA, 20 bp, synthetic construct
  source 1..20: mol_type = other DNA
gagacttctgatcccagatc

SEQ ID NO: 6426 - DNA, 20 bp, synthetic construct
  source 1..20: mol_type = other DNA
gtctcatgcctgctgttaga

SEQ ID NO: 6427 - DNA, 20 bp, synthetic construct
  source 1..20: mol_type = other DNA
agcagaagttacacctagtt

SEQ ID NO: 6428 - DNA, 20 bp, synthetic construct
  source 1..20: mol_type = other DNA
atttgtatgaggcgggacaa

SEQ ID NO: 6429 - DNA, 20 bp, synthetic construct
  source 1..20: mol_type = other DNA
tgagcgaattccctctgcta

SEQ ID NO: 6430 - DNA, 20 bp, synthetic construct
  source 1..20: mol_type = other DNA
gttatgctttcacctcagca

SEQ ID NO: 6431 - DNA, 20 bp, synthetic construct
  source 1..20: mol_type = other DNA
cataaactcgcctgattggt

SEQ ID NO: 6432 - DNA, 20 bp, synthetic construct
  source 1..20: mol_type = other DNA
gagatagtggaacttgcgga

SEQ ID NO: 6433 - DNA, 20 bp, synthetic construct
  source 1..20: mol_type = other DNA
cactggtcctctgaaataaa

SEQ ID NO: 6434 - DNA, 20 bp, synthetic construct
  source 1..20: mol_type = other DNA
tcttcccagaacccttcata

SEQ ID NO: 6435 - DNA, 20 bp, synthetic construct
  source 1..20: mol_type = other DNA
gggatgctcttcgacctcga

SEQ ID NO: 6436 - DNA, 20 bp, synthetic construct
  source 1..20: mol_type = other DNA
tgcccacatcatcaaaggtc

SEQ ID NO: 6437 - DNA, 20 bp, synthetic construct
  source 1..20: mol_type = other DNA
acgctgctcgtatccgacgg

SEQ ID NO: 6438 - DNA, 20 bp, synthetic construct
  source 1..20: mol_type = other DNA
cccagtggacttgcagaaaa

SEQ ID NO: 6439 - DNA, 20 bp, synthetic construct
  source 1..20: mol_type = other DNA
tcctctttagaccacatccc

SEQ ID NO: 6440 - DNA, 20 bp, synthetic construct
  source 1..20: mol_type = other DNA
ttgggcttctttctaaatcg

SEQ ID NO: 6441 - DNA, 20 bp, synthetic construct
  source 1..20: mol_type = other DNA
caaactcactcatggctttg

SEQ ID NO: 6442 - DNA, 20 bp, synthetic construct
  source 1..20: mol_type = other DNA
attggtattccggttatgga

SEQ ID NO: 6443 - DNA, 20 bp, synthetic construct
  source 1..20: mol_type = other DNA
tgtctacagcattggctaat

SEQ ID NO: 6444 - DNA, 20 bp, synthetic construct
  source 1..20: mol_type = other DNA
ggacaggagatcctcttagc

SEQ ID NO: 6445 - DNA, 20 bp, synthetic construct
  source 1..20: mol_type = other DNA
gagaaaatgagtgacttccc

SEQ ID NO: 6446 - DNA, 20 bp, synthetic construct
  source 1..20: mol_type = other DNA
tgcattcacagttcaacatg

SEQ ID NO: 6447 - DNA, 20 bp, synthetic construct
  source 1..20: mol_type = other DNA
cagcttttttcaaggcatag

SEQ ID NO: 6448 - DNA, 20 bp, synthetic construct
  source 1..20: mol_type = other DNA
gcttgtctacctttccaagg

SEQ ID NO: 6449 - DNA, 20 bp, synthetic construct
  source 1..20: mol_type = other DNA
ggcatttgtggttgggtcag

SEQ ID NO: 6450 - DNA, 20 bp, synthetic construct
  source 1..20: mol_type = other DNA
cgcgtcggcacccaagaatt

SEQ ID NO: 6451 - DNA, 20 bp, synthetic construct
  source 1..20: mol_type = other DNA
cagattggtgatgttgacat

SEQ ID NO: 6452 - DNA, 20 bp, synthetic construct
  source 1..20: mol_type = other DNA
attatctaggcacaccctgt

SEQ ID NO: 6453 - DNA, 20 bp, synthetic construct
  source 1..20: mol_type = other DNA
gccttgctcttagcatctcg

SEQ ID NO: 6454 - DNA, 20 bp, synthetic construct
  source 1..20: mol_type = other DNA
gtgcttttctcctttgatgt

SEQ ID NO: 6455 - DNA, 20 bp, synthetic construct
  source 1..20: mol_type = other DNA
gcccgcgaaatggaagccgt

SEQ ID NO: 6456 - DNA, 20 bp, synthetic construct
  source 1..20: mol_type = other DNA
gctgcagttcttcccaaagg

SEQ ID NO: 6457 - DNA, 20 bp, synthetic construct
  source 1..20: mol_type = other DNA
ctgtattcctaagagagcat

SEQ ID NO: 6458 - DNA, 20 bp, synthetic construct
  source 1..20: mol_type = other DNA
ccctaagaagatagcttgct

SEQ ID NO: 6459 - DNA, 20 bp, synthetic construct
  source 1..20: mol_type = other DNA
gctattttcttgcccttgta

SEQ ID NO: 6460 - DNA, 20 bp, synthetic construct
  source 1..20: mol_type = other DNA
cactggaaatgaagtaacag

SEQ ID NO: 6461 - DNA, 20 bp, synthetic construct
  source 1..20: mol_type = other DNA
ctccttccactggatagggt

SEQ ID NO: 6462 - DNA, 20 bp, synthetic construct
  source 1..20: mol_type = other DNA
gcatcgtgttatctctgggt

SEQ ID NO: 6463 - DNA, 20 bp, synthetic construct
  source 1..20: mol_type = other DNA
ggtgtccagagagctccaca

SEQ ID NO: 6464 - DNA, 20 bp, synthetic construct
  source 1..20: mol_type = other DNA
ctgttctacttcaatcctct

SEQ ID NO: 6465 - DNA, 20 bp, synthetic construct
  source 1..20: mol_type = other DNA
tgatctgctggatagcattt

SEQ ID NO: 6466 - DNA, 20 bp, synthetic construct
  source 1..20: mol_type = other DNA
agcctcgtttactgtcgcag

SEQ ID NO: 6467 - DNA, 20 bp, synthetic construct
  source 1..20: mol_type = other DNA
ttcattgcaatgtgctgtct

SEQ ID NO: 6468 - DNA, 20 bp, synthetic construct
  source 1..20: mol_type = other DNA
attcattctcaacgatgcca

SEQ ID NO: 6469 - DNA, 20 bp, synthetic construct
  source 1..20: mol_type = other DNA
tttgaaatttgggcacctca

SEQ ID NO: 6470 - DNA, 20 bp, synthetic construct
  source 1..20: mol_type = other DNA
gggaagccttcggcatcgca

SEQ ID NO: 6471 - DNA, 20 bp, synthetic construct
  source 1..20: mol_type = other DNA
actggctgcgtcttgaactc

SEQ ID NO: 6472 - DNA, 20 bp, synthetic construct
  source 1..20: mol_type = other DNA
cagctggtattcaacagccc

SEQ ID NO: 6473 - DNA, 20 bp, synthetic construct
  source 1..20: mol_type = other DNA
caggattctttctagctggg

SEQ ID NO: 6474 - DNA, 20 bp, synthetic construct
  source 1..20: mol_type = other DNA
cacacctctgcttttggaaa

SEQ ID NO: 6475 - DNA, 20 bp, synthetic construct
  source 1..20: mol_type = other DNA
catatctgtcagcatgttgg

SEQ ID NO: 6476 - DNA, 20 bp, synthetic construct
  source 1..20: mol_type = other DNA
tgactccgtgtcgggtgatg

SEQ ID NO: 6477 - DNA, 20 bp, synthetic construct
  source 1..20: mol_type = other DNA
agctttatctccacagacac

SEQ ID NO: 6478 - DNA, 20 bp, synthetic construct
  source 1..20: mol_type = other DNA
gcacttctttgccctagtag

SEQ ID NO: 6479 - DNA, 20 bp, synthetic construct
  source 1..20: mol_type = other DNA
ctgttggtggcatacttgaa

SEQ ID NO: 6480 - DNA, 20 bp, synthetic construct
  source 1..20: mol_type = other DNA
gttacagaagaccagtaagg

SEQ ID NO: 6481 - DNA, 20 bp, synthetic construct
  source 1..20: mol_type = other DNA
agccgcactgaccagatggg

SEQ ID NO: 6482 - DNA, 20 bp, synthetic construct
  source 1..20: mol_type = other DNA
gatgaagtgggtgccgtagt

SEQ ID NO: 6483 - DNA, 20 bp, synthetic construct
  source 1..20: mol_type = other DNA
tcgaaggaagggaatgttat

SEQ ID NO: 6484 - DNA, 20 bp, synthetic construct
  source 1..20: mol_type = other DNA
caggatgctcctgtttaagc

SEQ ID NO: 6485 - DNA, 20 bp, synthetic construct
  source 1..20: mol_type = other DNA
aacccagagaatgcagtaac

SEQ ID NO: 6486 - DNA, 20 bp, synthetic construct
  source 1..20: mol_type = other DNA
acctccacagtatacagaag

SEQ ID NO: 6487 - DNA, 20 bp, synthetic construct
  source 1..20: mol_type = other DNA
agggtcatgttcgtaggtgt

SEQ ID NO: 6488 - DNA, 20 bp, synthetic construct
  source 1..20: mol_type = other DNA
ctgactttagtagtgaactg

SEQ ID NO: 6489 - DNA, 20 bp, synthetic construct
  source 1..20: mol_type = other DNA
aggtgaaagttattcctccg

SEQ ID NO: 6490 - DNA, 20 bp, synthetic construct
  source 1..20: mol_type = other DNA
cattaggtaactgactgaca

SEQ ID NO: 6491 - DNA, 20 bp, synthetic construct
  source 1..20: mol_type = other DNA
accacagaaataagctcaga

SEQ ID NO: 6492 - DNA, 20 bp, synthetic construct
  source 1..20: mol_type = other DNA
tgtagcactaagacatctgg

SEQ ID NO: 6493 - DNA, 20 bp, synthetic construct
  source 1..20: mol_type = other DNA
aactgggtttcttggaaagt

SEQ ID NO: 6494 - DNA, 20 bp, synthetic construct
  source 1..20: mol_type = other DNA
acccactagatgcaaaaagc

SEQ ID NO: 6495 - DNA, 20 bp, synthetic construct
  source 1..20: mol_type = other DNA
ggtcctgctcaggtgaatcg

SEQ ID NO: 6496 - DNA, 20 bp, synthetic construct
  source 1..20: mol_type = other DNA
caacctctatcccttttcca

SEQ ID NO: 6497 - DNA, 20 bp, synthetic construct
  source 1..20: mol_type = other DNA
acggaaataacctagatggg

SEQ ID NO: 6498 - DNA, 20 bp, synthetic construct
  source 1..20: mol_type = other DNA
agctccatgtcgatagtctt

SEQ ID NO: 6499 - DNA, 20 bp, synthetic construct
  source 1..20: mol_type = other DNA
ttgtaagatgatagagccac

SEQ ID NO: 6500 - DNA, 20 bp, synthetic construct
  source 1..20: mol_type = other DNA
gtgtattgatgcagaaaagg

SEQ ID NO: 6501 - DNA, 20 bp, synthetic construct
  source 1..20: mol_type = other DNA
actagacaaagactggtctt

SEQ ID NO: 6502 - DNA, 20 bp, synthetic construct
  source 1..20: mol_type = other DNA
actttatcgcagctctcaga

SEQ ID NO: 6503 - DNA, 20 bp, synthetic construct
  source 1..20: mol_type = other DNA
gcaccatggaattactcacc

SEQ ID NO: 6504 - DNA, 20 bp, synthetic construct
  source 1..20: mol_type = other DNA
agacttcgagactggacaag

SEQ ID NO: 6505 - DNA, 20 bp, synthetic construct
  source 1..20: mol_type = other DNA
agtcttcacaggtgcattct

SEQ ID NO: 6506 - DNA, 20 bp, synthetic construct
  source 1..20: mol_type = other DNA
gtttaacaacagagaaacgg

SEQ ID NO: 6507 - DNA, 20 bp, synthetic construct
  source 1..20: mol_type = other DNA
tggagggagatgtcctaccg

SEQ ID NO: 6508 - DNA, 20 bp, synthetic construct
  source 1..20: mol_type = other DNA
cccacctagcattgaaactg

SEQ ID NO: 6509 - DNA, 20 bp, synthetic construct
  source 1..20: mol_type = other DNA
tttgttgatgtcctgcgtgc

SEQ ID NO: 6510 - DNA, 20 bp, synthetic construct
  source 1..20: mol_type = other DNA
aactttatttctcgccactg

SEQ ID NO: 6511 - DNA, 20 bp, synthetic construct
  source 1..20: mol_type = other DNA
tgagagttgcatttccagaa

SEQ ID NO: 6512 - DNA, 20 bp, synthetic construct
  source 1..20: mol_type = other DNA
cctcaatgacaggagtaaag

SEQ ID NO: 6513 - DNA, 20 bp, synthetic construct
  source 1..20: mol_type = other DNA
gagtctgtgtttttgcagga

SEQ ID NO: 6514 - DNA, 20 bp, synthetic construct
  source 1..20: mol_type = other DNA
agccggtgtcctcatccctg

SEQ ID NO: 6515 - DNA, 20 bp, synthetic construct
  source 1..20: mol_type = other DNA
agaggctgctggtctcatag

SEQ ID NO: 6516 - DNA, 20 bp, synthetic construct
  source 1..20: mol_type = other DNA
gacaagaaactcatggcttt

SEQ ID NO: 6517 - DNA, 20 bp, synthetic construct
  source 1..20: mol_type = other DNA
attggtccacgtgtagtctc

SEQ ID NO: 6518 - DNA, 20 bp, synthetic construct
  source 1..20: mol_type = other DNA
ctctgcaagagcaactttgt

SEQ ID NO: 6519 - DNA, 20 bp, synthetic construct
  source 1..20: mol_type = other DNA
tacataccatgagacacaca

SEQ ID NO: 6520 - DNA, 20 bp, synthetic construct
  source 1..20: mol_type = other DNA
agggtcctttctccatttaa

SEQ ID NO: 6521 - DNA, 20 bp, synthetic construct
  source 1..20: mol_type = other DNA
taccatggttttcccatctt

SEQ ID NO: 6522 - DNA, 20 bp, synthetic construct
  source 1..20: mol_type = other DNA
ggctgttgtccgtcttattg

SEQ ID NO: 6523 - DNA, 20 bp, synthetic construct
  source 1..20: mol_type = other DNA
acatcagggctcggttccgg

SEQ ID NO: 6524 - DNA, 20 bp, synthetic construct
  source 1..20: mol_type = other DNA
acgctggtcacggtcagtgc

SEQ ID NO: 6525 - DNA, 20 bp, synthetic construct
  source 1..20: mol_type = other DNA
gcctgggaagtatgtacacg

SEQ ID NO: 6526 - DNA, 20 bp, synthetic construct
  source 1..20: mol_type = other DNA
cgtcggagtccagcacggga

SEQ ID NO: 6527 - DNA, 20 bp, synthetic construct
  source 1..20: mol_type = other DNA
tagtctcagttggcagtgtt

SEQ ID NO: 6528 - DNA, 20 bp, synthetic construct
  source 1..20: mol_type = other DNA
gcctttaggatctctcttct

SEQ ID NO: 6529 - DNA, 20 bp, synthetic construct
  source 1..20: mol_type = other DNA
ccacgctctcctggtagatc

SEQ ID NO: 6530 - DNA, 20 bp, synthetic construct
  source 1..20: mol_type = other DNA
ggatccgcaagttgattcga

SEQ ID NO: 6531 - DNA, 20 bp, synthetic construct
  source 1..20: mol_type = other DNA
gcagagggttggcgcttaca

SEQ ID NO: 6532 - DNA, 20 bp, synthetic construct
  source 1..20: mol_type = other DNA
cttggaagaagtgcagatag

SEQ ID NO: 6533 - DNA, 20 bp, synthetic construct
  source 1..20: mol_type = other DNA
gcagtccaggagagttgggt

SEQ ID NO: 6534 - DNA, 20 bp, synthetic construct
  source 1..20: mol_type = other DNA
gatacaaacttggcctatca

SEQ ID NO: 6535 - DNA, 20 bp, synthetic construct
  source 1..20: mol_type = other DNA
tagcacctcagtagagctta

SEQ ID NO: 6536 - DNA, 20 bp, synthetic construct
  source 1..20: mol_type = other DNA
tagaagttagtctgcctgat

SEQ ID NO: 6537 - DNA, 20 bp, synthetic construct
  source 1..20: mol_type = other DNA
tcccaggcagctttttgagt

SEQ ID NO: 6538 - DNA, 20 bp, synthetic construct
  source 1..20: mol_type = other DNA
tgggatgtggttgggtgaac

SEQ ID NO: 6539 - DNA, 20 bp, synthetic construct
  source 1..20: mol_type = other DNA
gaaaggagttgactcagata

SEQ ID NO: 6540 - DNA, 20 bp, synthetic construct
  source 1..20: mol_type = other DNA
ggcgttgaggcgctcgtcgt

SEQ ID NO: 6541 - DNA, 20 bp, synthetic construct
  source 1..20: mol_type = other DNA
cacgagtcactctcgttttc

SEQ ID NO: 6542 - DNA, 20 bp, synthetic construct
  source 1..20: mol_type = other DNA
tgttctcaaactcacaccct

SEQ ID NO: 6543 - DNA, 20 bp, synthetic construct
  source 1..20: mol_type = other DNA
cattttcttcacggaaacag

SEQ ID NO: 6544 - DNA, 20 bp, synthetic construct
  source 1..20: mol_type = other DNA
tctgagtttcctcgggtcta

SEQ ID NO: 6545 - DNA, 20 bp, synthetic construct
  source 1..20: mol_type = other DNA
gaattgttctggaggaacaa

SEQ ID NO: 6546 - DNA, 20 bp, synthetic construct
  source 1..20: mol_type = other DNA
aaaatgcaaagccaccaaag

SEQ ID NO: 6547 - DNA, 20 bp, synthetic construct
  source 1..20: mol_type = other DNA
tgatcttcaaaagtgcccaa

SEQ ID NO: 6548 - DNA, 20 bp, synthetic construct
  source 1..20: mol_type = other DNA
acaggctcggacgcacgagc

SEQ ID NO: 6549 - DNA, 20 bp, synthetic construct
  source 1..20: mol_type = other DNA
gtccaatagtcgataacacc

SEQ ID NO: 6550 - DNA, 20 bp, synthetic construct
  source 1..20: mol_type = other DNA
cagctgcgccctttttgtcc

SEQ ID NO: 6551 - DNA, 20 bp, synthetic construct
  source 1..20: mol_type = other DNA
cgggatgaactggttggtcc

SEQ ID NO: 6552 - DNA, 20 bp, synthetic construct
  source 1..20: mol_type = other DNA
gtgggcatgaaattgcgagc

SEQ ID NO: 6553 - DNA, 20 bp, synthetic construct
  source 1..20: mol_type = other DNA
cacctccgtcaatttgtatt

SEQ ID NO: 6554 - DNA, 20 bp, synthetic construct
  source 1..20: mol_type = other DNA
ccggagaccctaaccgtacc

SEQ ID NO: 6555 - DNA, 20 bp, synthetic construct
  source 1..20: mol_type = other DNA
ctcgaaaaatagaccctact

SEQ ID NO: 6556 - DNA, 20 bp, synthetic construct
  source 1..20: mol_type = other DNA
ttagtgttctgtctcaagac

SEQ ID NO: 6557 - DNA, 20 bp, synthetic construct
  source 1..20: mol_type = other DNA
ctaatattctggaggtcagc

SEQ ID NO: 6558 - DNA, 20 bp, synthetic construct
  source 1..20: mol_type = other DNA
gccaggctttgaatcgcctc

SEQ ID NO: 6559 - DNA, 20 bp, synthetic construct
  source 1..20: mol_type = other DNA
catcccaatcaaggtcacga

SEQ ID NO: 6560 - DNA, 20 bp, synthetic construct
  source 1..20: mol_type = other DNA
cagctccgcaccgcaactga

SEQ ID NO: 6561 - DNA, 20 bp, synthetic construct
  source 1..20: mol_type = other DNA
caggcgcgggatgaagtcag

SEQ ID NO: 6562 - DNA, 20 bp, synthetic construct
  source 1..20: mol_type = other DNA
atgttttcatccatggtggc

SEQ ID NO: 6563 - DNA, 20 bp, synthetic construct
  source 1..20: mol_type = other DNA
accattaccagaagttgcca

SEQ ID NO: 6564 - DNA, 20 bp, synthetic construct
  source 1..20: mol_type = other DNA
ctgtagtggtcattagtaag

SEQ ID NO: 6565 - DNA, 20 bp, synthetic construct
  source 1..20: mol_type = other DNA
ctaaggtgctatttgggcaa

SEQ ID NO: 6566 - DNA, 20 bp, synthetic construct
  source 1..20: mol_type = other DNA
agagctggtcaaaagtgtag

SEQ ID NO: 6567 - DNA, 20 bp, synthetic construct
  source 1..20: mol_type = other DNA
cttttcaatcagatgtgccc

SEQ ID NO: 6568 - DNA, 20 bp, synthetic construct
  source 1..20: mol_type = other DNA
tgagcggttgcagtaccggg

SEQ ID NO: 6569 - DNA, 20 bp, synthetic construct
  source 1..20: mol_type = other DNA
ctaccaccttcacagatgac

SEQ ID NO: 6570 - DNA, 20 bp, synthetic construct
  source 1..20: mol_type = other DNA
ctgagagtcatcaaactcca

SEQ ID NO: 6571 - DNA, 20 bp, synthetic construct
  source 1..20: mol_type = other DNA
tcttgtgctatggatttgca

SEQ ID NO: 6572 - DNA, 20 bp, synthetic construct
  source 1..20: mol_type = other DNA
aaggaggcctttaccacgcg

SEQ ID NO: 6573 - DNA, 20 bp, synthetic construct
  source 1..20: mol_type = other DNA
ccatttgcattaacttgggc

SEQ ID NO: 6574 - DNA, 20 bp, synthetic construct
  source 1..20: mol_type = other DNA
accctgttttctgccgtgtt

SEQ ID NO: 6575 - DNA, 20 bp, synthetic construct
  source 1..20: mol_type = other DNA
cctccagcatctgagtgata

SEQ ID NO: 6576 - DNA, 20 bp, synthetic construct
  source 1..20: mol_type = other DNA
gccaggctcgttcccaacag

SEQ ID NO: 6577 - DNA, 20 bp, synthetic construct
  source 1..20: mol_type = other DNA
ctctaataccgtagtggttc

SEQ ID NO: 6578 - DNA, 20 bp, synthetic construct
  source 1..20: mol_type = other DNA
gggtctgtggcagacaccac

SEQ ID NO: 6579 - DNA, 20 bp, synthetic construct
  source 1..20: mol_type = other DNA
tcatgagggttggtgcaacg

SEQ ID NO: 6580 - DNA, 20 bp, synthetic construct
  source 1..20: mol_type = other DNA
accaagaaatggatctgtgg

SEQ ID NO: 6581 - DNA, 20 bp, synthetic construct
  source 1..20: mol_type = other DNA
cgtgggcgcgctgattaggc

SEQ ID NO: 6582 - DNA, 20 bp, synthetic construct
  source 1..20: mol_type = other DNA
gaagcacctggccattcaga

SEQ ID NO: 6583 - DNA, 20 bp, synthetic construct
  source 1..20: mol_type = other DNA
aggctatggcaaatccgaat

SEQ ID NO: 6584 - DNA, 20 bp, synthetic construct
  source 1..20: mol_type = other DNA
gactcccaatgtactttcat

SEQ ID NO: 6585 - DNA, 20 bp, synthetic construct
  source 1..20: mol_type = other DNA
gtggtcaacacttaattcgt

SEQ ID NO: 6586 - DNA, 20 bp, synthetic construct
  source 1..20: mol_type = other DNA
gcttctaatcttattcgggt

SEQ ID NO: 6587 - DNA, 20 bp, synthetic construct
  source 1..20: mol_type = other DNA
gctgagaatacactcttgaa

SEQ ID NO: 6588 - DNA, 20 bp, synthetic construct
  source 1..20: mol_type = other DNA
tgactaggatgttcccgata

SEQ ID NO: 6589 - DNA, 20 bp, synthetic construct
  source 1..20: mol_type = other DNA
atcacggatcacttcccatg

SEQ ID NO: 6590 - DNA, 20 bp, synthetic construct
  source 1..20: mol_type = other DNA
atagaagccttctccgtctg

SEQ ID NO: 6591 - DNA, 20 bp, synthetic construct
  source 1..20: mol_type = other DNA
ccagaggatatgtaggtaat

SEQ ID NO: 6592 - DNA, 20 bp, synthetic construct
  source 1..20: mol_type = other DNA
gtcctttcccactgtactat

SEQ ID NO: 6593 - DNA, 20 bp, synthetic construct
  source 1..20: mol_type = other DNA
aggatgccaaccaccatcaa

SEQ ID NO: 6594 - DNA, 20 bp, synthetic construct
  source 1..20: mol_type = other DNA
tcatcacttgagagactggt

SEQ ID NO: 6595 - DNA, 20 bp, synthetic construct
  source 1..20: mol_type = other DNA
gtcatttcttgtccttacca

SEQ ID NO: 6596 - DNA, 20 bp, synthetic construct
  source 1..20: mol_type = other DNA
cttaacgttcgcagagtgca

SEQ ID NO: 6597 - DNA, 20 bp, synthetic construct
  source 1..20: mol_type = other DNA
tcttcactggtatgacagtc

SEQ ID NO: 6598 - DNA, 20 bp, synthetic construct
  source 1..20: mol_type = other DNA
ctcttcctgaaagcaagcaa

SEQ ID NO: 6599 - DNA, 20 bp, synthetic construct
  source 1..20: mol_type = other DNA
ctctcttgtttatcttggca

SEQ ID NO: 6600 - DNA, 20 bp, synthetic construct
  source 1..20: mol_type = other DNA
ctaagggctcttaaaaacgt

SEQ ID NO: 6601 - DNA, 20 bp, synthetic construct
  source 1..20: mol_type = other DNA
cagctttctcaactagtaca

SEQ ID NO: 6602 - DNA, 20 bp, synthetic construct
  source 1..20: mol_type = other DNA
gtaggtctcatctgctttta

SEQ ID NO: 6603 - DNA, 20 bp, synthetic construct
  source 1..20: mol_type = other DNA
cagcctttccactgttagcg

SEQ ID NO: 6604 - DNA, 20 bp, synthetic construct
  source 1..20: mol_type = other DNA
gtagcggcgacatctgggtg

SEQ ID NO: 6605 - DNA, 20 bp, synthetic construct
  source 1..20: mol_type = other DNA
cccaccagctaaacgcactg

SEQ ID NO: 6606 - DNA, 20 bp, synthetic construct
  source 1..20: mol_type = other DNA
gcttgtttgctatttcacca

SEQ ID NO: 6607 - DNA, 20 bp, synthetic construct
  source 1..20: mol_type = other DNA
cttcagaccagtaagataca

SEQ ID NO: 6608 - DNA, 20 bp, synthetic construct
  source 1..20: mol_type = other DNA
tgtaactcaaggtcggctat

SEQ ID NO: 6609 - DNA, 20 bp, synthetic construct
  source 1..20: mol_type = other DNA
gtcattgatccacatgatct

SEQ ID NO: 6610 - DNA, 20 bp, synthetic construct
  source 1..20: mol_type = other DNA
gggtggagtcctccgagctg

SEQ ID NO: 6611 - DNA, 20 bp, synthetic construct
  source 1..20: mol_type = other DNA
gattaggttagaagcgccca

SEQ ID NO: 6612 - DNA, 20 bp, synthetic construct
  source 1..20: mol_type = other DNA
tttggatccagttgataacg

SEQ ID NO: 6613 - DNA, 20 bp, synthetic construct
  source 1..20: mol_type = other DNA
caccgtccggtctccacgct

SEQ ID NO: 6614 - DNA, 20 bp, synthetic construct
  source 1..20: mol_type = other DNA
tcgtaggtaaaagggtcaat

SEQ ID NO: 6615 - DNA, 20 bp, synthetic construct
  source 1..20: mol_type = other DNA
gcaggtggtcgtgattcggg

SEQ ID NO: 6616 - DNA, 20 bp, synthetic construct
  source 1..20: mol_type = other DNA
atcagggtgaaaaggagccc

SEQ ID NO: 6617 - DNA, 20 bp, synthetic construct
  source 1..20: mol_type = other DNA
gtgggtagtgcataattgtc

SEQ ID NO: 6618 - DNA, 20 bp, synthetic construct
  source 1..20: mol_type = other DNA
aatgggagactggcatagaa

SEQ ID NO: 6619 - DNA, 20 bp, synthetic construct
  source 1..20: mol_type = other DNA
tgctggcaaagtttatccat

SEQ ID NO: 6620 - DNA, 20 bp, synthetic construct
  source 1..20: mol_type = other DNA
tcttctcctactttgccgca

SEQ ID NO: 6621 - DNA, 20 bp, synthetic construct
  source 1..20: mol_type = other DNA
agcttttggtggttgtttca

SEQ ID NO: 6622 - DNA, 20 bp, synthetic construct
  source 1..20: mol_type = other DNA
ccacagcgcaatctttagtc

SEQ ID NO: 6623 - DNA, 20 bp, synthetic construct
  source 1..20: mol_type = other DNA
gatgggcatggtgacgccac

SEQ ID NO: 6624 - DNA, 20 bp, synthetic construct
  source 1..20: mol_type = other DNA
gccaccagggcacctgtatt

SEQ ID NO: 6625 - DNA, 20 bp, synthetic construct
  source 1..20: mol_type = other DNA
tttctaggtagctcgctaga

SEQ ID NO: 6626 - DNA, 20 bp, synthetic construct
  source 1..20: mol_type = other DNA
ccatccactacttcttgcac

SEQ ID NO: 6627 - DNA, 20 bp, synthetic construct
  source 1..20: mol_type = other DNA
agggattgaaggcttcgcaa

SEQ ID NO: 6628 - DNA, 20 bp, synthetic construct
  source 1..20: mol_type = other DNA
taaaggttaccaaggcttga

SEQ ID NO: 6629 - DNA, 20 bp, synthetic construct
  source 1..20: mol_type = other DNA
accttgaacatactgacgga

SEQ ID NO: 6630 - DNA, 20 bp, synthetic construct
  source 1..20: mol_type = other DNA
acctcctgctggtttgggcg

SEQ ID NO: 6631 - DNA, 20 bp, synthetic construct
  source 1..20: mol_type = other DNA
ttgctgccaggtaaatttcc

SEQ ID NO: 6632 - DNA, 20 bp, synthetic construct
  source 1..20: mol_type = other DNA
cagttcctcatactctaaag

SEQ ID NO: 6633 - DNA, 20 bp, synthetic construct
  source 1..20: mol_type = other DNA
ctgccaggtaacgttgttat

SEQ ID NO: 6634 - DNA, 20 bp, synthetic construct
  source 1..20: mol_type = other DNA
tggccctgaagaacctgagt

SEQ ID NO: 6635 - DNA, 20 bp, synthetic construct
  source 1..20: mol_type = other DNA
gaacttctctgggtagccga

SEQ ID NO: 6636 - DNA, 20 bp, synthetic construct
  source 1..20: mol_type = other DNA
tcgttgttatggacgcaagg

SEQ ID NO: 6637 - DNA, 20 bp, synthetic construct
  source 1..20: mol_type = other DNA
ttgacgaaataacaggtgtc

SEQ ID NO: 6638 - DNA, 20 bp, synthetic construct
  source 1..20: mol_type = other DNA
ggcagggacacataggcccg

SEQ ID NO: 6639 - DNA, 20 bp, synthetic construct
  source 1..20: mol_type = other DNA
ctctctgacctggccgttgc

SEQ ID NO: 6640 - DNA, 20 bp, synthetic construct
  source 1..20: mol_type = other DNA
agcggtagggcctggcgtca

SEQ ID NO: 6641 - DNA, 20 bp, synthetic construct
  source 1..20: mol_type = other DNA
gaggaggacagctgattagt

SEQ ID NO: 6642 - DNA, 20 bp, synthetic construct
  source 1..20: mol_type = other DNA
ctgggcactcatgactcgct

SEQ ID NO: 6643 - DNA, 20 bp, synthetic construct
  source 1..20: mol_type = other DNA
ggcgtgcggcggaggcttaa

SEQ ID NO: 6644 - DNA, 20 bp, synthetic construct
  source 1..20: mol_type = other DNA
gaggaggcctaaaatgagcg

SEQ ID NO: 6645 - DNA, 20 bp, synthetic construct
  source 1..20: mol_type = other DNA
ttccctcctttgccaagtat

SEQ ID NO: 6646 - DNA, 20 bp, synthetic construct
  source 1..20: mol_type = other DNA
ttggagatctgtatccttgc

SEQ ID NO: 6647 - DNA, 20 bp, synthetic construct
  source 1..20: mol_type = other DNA
caacattgcttccaagctaa

SEQ ID NO: 6648 - DNA, 20 bp, synthetic construct
  source 1..20: mol_type = other DNA
aggccctgacatcacatagt

SEQ ID NO: 6649 - DNA, 20 bp, synthetic construct
  source 1..20: mol_type = other DNA
gaggccatcacatgttggtc

SEQ ID NO: 6650 - DNA, 20 bp, synthetic construct
  source 1..20: mol_type = other DNA
cagaagcacatcacatacac

SEQ ID NO: 6651 - DNA, 20 bp, synthetic construct
  source 1..20: mol_type = other DNA
caatcccaccctagacagac

SEQ ID NO: 6652 - DNA, 20 bp, synthetic construct
  source 1..20: mol_type = other DNA
gccgccgtgtcgcctctcaa

SEQ ID NO: 6653 - DNA, 20 bp, synthetic construct
  source 1..20: mol_type = other DNA
cccaggacgtgctgtgcttt

SEQ ID NO: 6654 - DNA, 20 bp, synthetic construct
  source 1..20: mol_type = other DNA
atgtgcagcggctggatggg

SEQ ID NO: 6655 - DNA, 20 bp, synthetic construct
  source 1..20: mol_type = other DNA
caagtctgcccttttgtgac

SEQ ID NO: 6656 - DNA, 20 bp, synthetic construct
  source 1..20: mol_type = other DNA
ttatcgtgcctggataccga

SEQ ID NO: 6657 - DNA, 20 bp, synthetic construct
  source 1..20: mol_type = other DNA
gtctcactgcacccaaagga

SEQ ID NO: 6658 - DNA, 20 bp, synthetic construct
  source 1..20: mol_type = other DNA
cggcccggacacgccttaca

SEQ ID NO: 6659 - DNA, 20 bp, synthetic construct
  source 1..20: mol_type = other DNA
gaaagtgctgatgccatgtg

SEQ ID NO: 6660 - DNA, 20 bp, synthetic construct
  source 1..20: mol_type = other DNA
agaaatgaaagcccatggac

SEQ ID NO: 6661 - DNA, 20 bp, synthetic construct
  source 1..20: mol_type = other DNA
caacttcccttgcacgtatc

SEQ ID NO: 6662 - DNA, 20 bp, synthetic construct
  source 1..20: mol_type = other DNA
ggagtaggagaaactttttg

SEQ ID NO: 6663 - DNA, 20 bp, synthetic construct
  source 1..20: mol_type = other DNA
gctgtgtatttcaagagcat

SEQ ID NO: 6664 - DNA, 20 bp, synthetic construct
  source 1..20: mol_type = other DNA
agaacagggatgatgttggg

SEQ ID NO: 6665 - DNA, 20 bp, synthetic construct
  source 1..20: mol_type = other DNA
gtagctacacagaaagacat

SEQ ID NO: 6666 - DNA, 20 bp, synthetic construct
  source 1..20: mol_type = other DNA
tccagaggctcaacactaaa

SEQ ID NO: 6667 - DNA, 20 bp, synthetic construct
  source 1..20: mol_type = other DNA
ccaaattcatagcggattcc

SEQ ID NO: 6668 - DNA, 20 bp, synthetic construct
  source 1..20: mol_type = other DNA
gtctatcactgctacatagg

SEQ ID NO: 6669 - DNA, 20 bp, synthetic construct
  source 1..20: mol_type = other DNA
cacatcaacctagcaaggat

SEQ ID NO: 6670 - DNA, 20 bp, synthetic construct
  source 1..20: mol_type = other DNA
ccatgcaagaagagccaagg

SEQ ID NO: 6671 - DNA, 20 bp, synthetic construct
  source 1..20: mol_type = other DNA
aggtggcgagtaaaagctgc

SEQ ID NO: 6672 - DNA, 20 bp, synthetic construct
  source 1..20: mol_type = other DNA
caaggccttgcaaaactcag

SEQ ID NO: 6673 - DNA, 20 bp, synthetic construct
  source 1..20: mol_type = other DNA
ctgcatcttttaactggctg

SEQ ID NO: 6674 - DNA, 20 bp, synthetic construct
  source 1..20: mol_type = other DNA
actgattaggaaatggtctg

SEQ ID NO: 6675 - DNA, 20 bp, synthetic construct
  source 1..20: mol_type = other DNA
acctggttcttcatggctgc

SEQ ID NO: 6676 - DNA, 20 bp, synthetic construct
  source 1..20: mol_type = other DNA
cctacacagtttactttggc

SEQ ID NO: 6677 - DNA, 20 bp, synthetic construct
  source 1..20: mol_type = other DNA
gttcccaacatcaatgcaca

SEQ ID NO: 6678 - DNA, 20 bp, synthetic construct
  source 1..20: mol_type = other DNA
actccaatacagacgtatag

SEQ ID NO: 6679 - DNA, 20 bp, synthetic construct
  source 1..20: mol_type = other DNA
tggaggtaccacatgcagca

SEQ ID NO: 6680 - DNA, 20 bp, synthetic construct
  source 1..20: mol_type = other DNA
cgcctcgtcttccgccacct

SEQ ID NO: 6681 - DNA, 20 bp, synthetic construct
  source 1..20: mol_type = other DNA
gacgcatgcgcgcctttttc

SEQ ID NO: 6682 - DNA, 20 bp, synthetic construct
  source 1..20: mol_type = other DNA
ggctcactcatccctctacg

SEQ ID NO: 6683 - DNA, 20 bp, synthetic construct
  source 1..20: mol_type = other DNA
gcatgtccacaaagttctcc

SEQ ID NO: 6684 - DNA, 20 bp, synthetic construct
  source 1..20: mol_type = other DNA
actgaaaatgcacttgcttg

SEQ ID NO: 6685 - DNA, 20 bp, synthetic construct
  source 1..20: mol_type = other DNA
ggagtgtggagaaaaaggga

SEQ ID NO: 6686 - DNA, 20 bp, synthetic construct
  source 1..20: mol_type = other DNA
tggtgtccgctttgccgtcc

SEQ ID NO: 6687 - DNA, 20 bp, synthetic construct
  source 1..20: mol_type = other DNA
ccattggcaagttctcgtac

SEQ ID NO: 6688 - DNA, 20 bp, synthetic construct
  source 1..20: mol_type = other DNA
gtgcagtcaatgttgggtgg

SEQ ID NO: 6689 - DNA, 20 bp, synthetic construct
  source 1..20: mol_type = other DNA
ttcttgacgttgttgactgg

SEQ ID NO: 6690 - DNA, 20 bp, synthetic construct
  source 1..20: mol_type = other DNA
gtttgttgtgatgagtgacc

SEQ ID NO: 6691 - DNA, 20 bp, synthetic construct
  source 1..20: mol_type = other DNA
tgcgcttaaatgtatcccga

SEQ ID NO: 6692 - DNA, 20 bp, synthetic construct
  source 1..20: mol_type = other DNA
aatgtacttgttgccttgca

SEQ ID NO: 6693 - DNA, 20 bp, synthetic construct
  source 1..20: mol_type = other DNA
cttccacatctgtagttctt

SEQ ID NO: 6694 - DNA, 20 bp, synthetic construct
  source 1..20: mol_type = other DNA
tggaccgaggagccctcaca

SEQ ID NO: 6695 - DNA, 20 bp, synthetic construct
  source 1..20: mol_type = other DNA
cgtgttctcacaccggtgct

SEQ ID NO: 6696 - DNA, 20 bp, synthetic construct
  source 1..20: mol_type = other DNA
gaatgtgtcctgctaaatga

SEQ ID NO: 6697 - DNA, 20 bp, synthetic construct
  source 1..20: mol_type = other DNA
gaatggcttctaggcaaccc

SEQ ID NO: 6698 - DNA, 20 bp, synthetic construct
  source 1..20: mol_type = other DNA
atgtatcgtggactagcaga

SEQ ID NO: 6699 - DNA, 20 bp, synthetic construct
  source 1..20: mol_type = other DNA
caagttatagacacagccaa

SEQ ID NO: 6700 - DNA, 20 bp, synthetic construct
  source 1..20: mol_type = other DNA
tcagatccatacatcagaac

SEQ ID NO: 6701 - DNA, 20 bp, synthetic construct
  source 1..20: mol_type = other DNA
cagctgactctgcataaaaa

SEQ ID NO: 6702 - DNA, 20 bp, synthetic construct
  source 1..20: mol_type = other DNA
tcccgatctggcaatacagg

SEQ ID NO: 6703 - DNA, 20 bp, synthetic construct
  source 1..20: mol_type = other DNA
catttcggaaaaggattagg

SEQ ID NO: 6704 - DNA, 20 bp, synthetic construct
  source 1..20: mol_type = other DNA
acgaaggccttggcaaaacg

SEQ ID NO: 6705 - DNA, 20 bp, synthetic construct
  source 1..20: mol_type = other DNA
caccgagatgctcagagata

SEQ ID NO: 6706 - DNA, 20 bp, synthetic construct
  source 1..20: mol_type = other DNA
ccaggcctcttacggaaccc

SEQ ID NO: 6707 - DNA, 20 bp, synthetic construct
  source 1..20: mol_type = other DNA
ttcaaactaggctacattgg

SEQ ID NO: 6708 - DNA, 20 bp, synthetic construct
  source 1..20: mol_type = other DNA
ctgtcgaccaaatgcacaag

SEQ ID NO: 6709 - DNA, 20 bp, synthetic construct
  source 1..20: mol_type = other DNA
tcttactgcgtcctttagag

SEQ ID NO: 6710 - DNA, 20 bp, synthetic construct
  source 1..20: mol_type = other DNA
actagcagtttccggaagtc

SEQ ID NO: 6711 - DNA, 20 bp, synthetic construct
  source 1..20: mol_type = other DNA
accagctagatctttgtcca

SEQ ID NO: 6712 - DNA, 20 bp, synthetic construct
  source 1..20: mol_type = other DNA
tagcaagagaaagcaaagcg

SEQ ID NO: 6713 - DNA, 20 bp, synthetic construct
  source 1..20: mol_type = other DNA
ccatcaagggaatgtttagt

SEQ ID NO: 6714 - DNA, 20 bp, synthetic construct
  source 1..20: mol_type = other DNA
cccgaacctttggcagtaac

SEQ ID NO: 6715 - DNA, 20 bp, synthetic construct
  source 1..20: mol_type = other DNA
tgcttagacatgactgtggt

SEQ ID NO: 6716 - DNA, 20 bp, synthetic construct
  source 1..20: mol_type = other DNA
gcctttcctgttgtagcaaa

SEQ ID NO: 6717 - DNA, 20 bp, synthetic construct
  source 1..20: mol_type = other DNA
acgcttctccttccttacaa

SEQ ID NO: 6718 - DNA, 20 bp, synthetic construct
  source 1..20: mol_type = other DNA
gacgattcacatcgccgtta

SEQ ID NO: 6719 - DNA, 20 bp, synthetic construct
  source 1..20: mol_type = other DNA
aggagagaccgtaatgtctg

SEQ ID NO: 6720 - DNA, 20 bp, synthetic construct
  source 1..20: mol_type = other DNA
gatcagtgttcctgaggtgc

SEQ ID NO: 6721 - DNA, 20 bp, synthetic construct
  source 1..20: mol_type = other DNA
taaaatgggacgcatttgcc

SEQ ID NO: 6722 - DNA, 20 bp, synthetic construct
  source 1..20: mol_type = other DNA
ccttcaggtaggcgaagaca

SEQ ID NO: 6723 - DNA, 20 bp, synthetic construct
  source 1..20: mol_type = other DNA
gatggatatgcaacgacact

SEQ ID NO: 6724 - DNA, 20 bp, synthetic construct
  source 1..20: mol_type = other DNA
gcatggatggagtcctattt

SEQ ID NO: 6725 - DNA, 20 bp, synthetic construct
  source 1..20: mol_type = other DNA
cggcgctcactgcttgtccg

SEQ ID NO: 6726 - DNA, 20 bp, synthetic construct
  source 1..20: mol_type = other DNA
ccttactcccttctatacca

SEQ ID NO: 6727 - DNA, 20 bp, synthetic construct
  source 1..20: mol_type = other DNA
cgaactttgctgatgggatg

SEQ ID NO: 6728 - DNA, 20 bp, synthetic construct
  source 1..20: mol_type = other DNA
tggagtaatgcttcacaatg

SEQ ID NO: 6729 - DNA, 20 bp, synthetic construct
  source 1..20: mol_type = other DNA
atgatgcatgtcagatgcct

SEQ ID NO: 6730 - DNA, 20 bp, synthetic construct
  source 1..20: mol_type = other DNA
tcgcagaaagctgggatgta

SEQ ID NO: 6731 - DNA, 20 bp, synthetic construct
  source 1..20: mol_type = other DNA
ttaaggataactaccttggg

SEQ ID NO: 6732 - DNA, 20 bp, synthetic construct
  source 1..20: mol_type = other DNA
ctcctcgtcgcagtagaaat

SEQ ID NO: 6733 - DNA, 20 bp, synthetic construct
  source 1..20: mol_type = other DNA
gtcagaccttcagtatacag

SEQ ID NO: 6734 - DNA, 20 bp, synthetic construct
  source 1..20: mol_type = other DNA
agactgttgagagagtaggg

SEQ ID NO: 6735 - DNA, 20 bp, synthetic construct
  source 1..20: mol_type = other DNA
ctgcagtcgtagatggtgaa

SEQ ID NO: 6736 - DNA, 20 bp, synthetic construct
  source 1..20: mol_type = other DNA
cgcccagggactcgttgacc

SEQ ID NO: 6737 - DNA, 20 bp, synthetic construct
  source 1..20: mol_type = other DNA
ctcgggaccgccgaatcctg

SEQ ID NO: 6738 - DNA, 20 bp, synthetic construct
  source 1..20: mol_type = other DNA
ggacggttattgtgccatct

SEQ ID NO: 6739 - DNA, 20 bp, synthetic construct
  source 1..20: mol_type = other DNA
tctcctctttcatatcctcc

SEQ ID NO: 6740 - DNA, 20 bp, synthetic construct
  source 1..20: mol_type = other DNA
ccttgtttccacgtcctttc

SEQ ID NO: 6741 - DNA, 20 bp, synthetic construct
  source 1..20: mol_type = other DNA
cacggccaaaatttccaatc

SEQ ID NO: 6742 - DNA, 20 bp, synthetic construct
  source 1..20: mol_type = other DNA
ctgcaacatccgtttccaaa

SEQ ID NO: 6743 - DNA, 20 bp, synthetic construct
  source 1..20: mol_type = other DNA
ttgctgtatacaacacagtg

SEQ ID NO: 6744 - DNA, 20 bp, synthetic construct
  source 1..20: mol_type = other DNA
ggaatggataagacctggta

SEQ ID NO: 6745 - DNA, 20 bp, synthetic construct
  source 1..20: mol_type = other DNA
gggttacaattacgggctct

SEQ ID NO: 6746 - DNA, 20 bp, synthetic construct
  source 1..20: mol_type = other DNA
ttcctggtactacttaaacc

SEQ ID NO: 6747 - DNA, 20 bp, synthetic construct
  source 1..20: mol_type = other DNA
tgcaggaactgttacacatg

SEQ ID NO: 6748 - DNA, 20 bp, synthetic construct
  source 1..20: mol_type = other DNA
gatccactcacagtttccat

SEQ ID NO: 6749 - DNA, 20 bp, synthetic construct
  source 1..20: mol_type = other DNA
gtggtcttcaagtccgatgg

SEQ ID NO: 6750 - DNA, 20 bp, synthetic construct
  source 1..20: mol_type = other DNA
gaagcgaaaattccatggga

SEQ ID NO: 6751 - DNA, 20 bp, synthetic construct
  source 1..20: mol_type = other DNA
tggtgaacatcagcaaaccg

SEQ ID NO: 6752 - DNA, 20 bp, synthetic construct
  source 1..20: mol_type = other DNA
ggaggaggattataacttag

SEQ ID NO: 6753 - DNA, 20 bp, synthetic construct
  source 1..20: mol_type = other DNA
catcacctttgatgggaagt

SEQ ID NO: 6754 - DNA, 20 bp, synthetic construct
  source 1..20: mol_type = other DNA
tcctttagagttcagctcta

SEQ ID NO: 6755 - DNA, 20 bp, synthetic construct
  source 1..20: mol_type = other DNA
ctttctactccgcaagaaca

SEQ ID NO: 6756 - DNA, 20 bp, synthetic construct
  source 1..20: mol_type = other DNA
agcactttatccacagcggc

SEQ ID NO: 6757 - DNA, 20 bp, synthetic construct
  source 1..20: mol_type = other DNA
tgagacaaatcagctcatag

SEQ ID NO: 6758 - DNA, 20 bp, synthetic construct
  source 1..20: mol_type = other DNA
tgtggccgagggtacgacac

SEQ ID NO: 6759 - DNA, 20 bp, synthetic construct
  source 1..20: mol_type = other DNA
gttgcaggaggtgcttacgc

SEQ ID NO: 6760 - DNA, 20 bp, synthetic construct
  source 1..20: mol_type = other DNA
tgttaaacctaactgtccga

SEQ ID NO: 6761 - DNA, 20 bp, synthetic construct
  source 1..20: mol_type = other DNA
cccttcaagatacctataga

SEQ ID NO: 6762 - DNA, 20 bp, synthetic construct
  source 1..20: mol_type = other DNA
tggccgtggctaccatctca

SEQ ID NO: 6763 - DNA, 20 bp, synthetic construct
  source 1..20: mol_type = other DNA
gagaccgtcctggcgcgatg

SEQ ID NO: 6764 - DNA, 20 bp, synthetic construct
  source 1..20: mol_type = other DNA
gtatgtctcgtggtaggact

SEQ ID NO: 6765 - DNA, 20 bp, synthetic construct
  source 1..20: mol_type = other DNA
ctcctgatgtgcatatccgt

SEQ ID NO: 6766 - DNA, 20 bp, synthetic construct
  source 1..20: mol_type = other DNA
ggaacatggaagtcaacgtt

SEQ ID NO: 6767 - DNA, 20 bp, synthetic construct
  source 1..20: mol_type = other DNA
tgcgtgtgctagcgtactcc

SEQ ID NO: 6768 - DNA, 20 bp, synthetic construct
  source 1..20: mol_type = other DNA
gacgtatcaatgaatatgcc

SEQ ID NO: 6769 - DNA, 20 bp, synthetic construct
  source 1..20: mol_type = other DNA
cacagctcaagacgctggaa

SEQ ID NO: 6770 - DNA, 20 bp, synthetic construct
  source 1..20: mol_type = other DNA
ggtgactgttcttgacactg

SEQ ID NO: 6771 - DNA, 20 bp, synthetic construct
  source 1..20: mol_type = other DNA
tctcaggctcaccagatgag

SEQ ID NO: 6772 - DNA, 20 bp, synthetic construct
  source 1..20: mol_type = other DNA
ttttctccatcaacaaccag

SEQ ID NO: 6773 - DNA, 20 bp, synthetic construct
  source 1..20: mol_type = other DNA
ggaatacagagcggaggtcg

SEQ ID NO: 6774 - DNA, 20 bp, synthetic construct
  source 1..20: mol_type = other DNA
gtggtaggaatgttccaccc

SEQ ID NO: 6775 - DNA, 20 bp, synthetic construct
  source 1..20: mol_type = other DNA
ccatcatcaacaccttccac

SEQ ID NO: 6776 - DNA, 20 bp, synthetic construct
  source 1..20: mol_type = other DNA
aggcctcacacacaatgtgt

SEQ ID NO: 6777 - DNA, 20 bp, synthetic construct
  source 1..20: mol_type = other DNA
cagatcttccgagacaggac

SEQ ID NO: 6778 - DNA, 20 bp, synthetic construct
  source 1..20: mol_type = other DNA
ctccaagcccagattcagat

SEQ ID NO: 6779 - DNA, 20 bp, synthetic construct
  source 1..20: mol_type = other DNA
ggtctgcaatctcacctacc

SEQ ID NO: 6780 - DNA, 20 bp, synthetic construct
  source 1..20: mol_type = other DNA
acatctcaaacaagagtcct

SEQ ID NO: 6781 - DNA, 20 bp, synthetic construct
  source 1..20: mol_type = other DNA
cggagtgcgcgacgattcta

SEQ ID NO: 6782 - DNA, 20 bp, synthetic construct
  source 1..20: mol_type = other DNA
gaaaaataggctggattgga

SEQ ID NO: 6783 - DNA, 20 bp, synthetic construct
  source 1..20: mol_type = other DNA
ggctgatgatacggccgagc

SEQ ID NO: 6784 - DNA, 20 bp, synthetic construct
  source 1..20: mol_type = other DNA
cctcaagtaaaccgtttcat

SEQ ID NO: 6785 - DNA, 20 bp, synthetic construct
  source 1..20: mol_type = other DNA
atgcacttgagatcttcact

SEQ ID NO: 6786 - DNA, 20 bp, synthetic construct
  source 1..20: mol_type = other DNA
gtgtttgcccagttattgct

SEQ ID NO: 6787 - DNA, 20 bp, synthetic construct
  source 1..20: mol_type = other DNA
gctctcattcgtggtcagat

SEQ ID NO: 6788 - DNA, 20 bp, synthetic construct
  source 1..20: mol_type = other DNA
atgagggttgtcaatgagct

SEQ ID NO: 6789 - DNA, 20 bp, synthetic construct
  source 1..20: mol_type = other DNA
gggtgagtgcgatcttttcc

SEQ ID NO: 6790 - DNA, 20 bp, synthetic construct
  source 1..20: mol_type = other DNA
caaggactgcaaatcctagg

SEQ ID NO: 6791 - DNA, 20 bp, synthetic construct
  source 1..20: mol_type = other DNA
aaagtgaagggacatatgag

SEQ ID NO: 6792 - DNA, 20 bp, synthetic construct
  source 1..20: mol_type = other DNA
ctctcaccaaataactgcat

SEQ ID NO: 6793 - DNA, 20 bp, synthetic construct
  source 1..20: mol_type = other DNA
tgctggcaaatgggatctag

SEQ ID NO: 6794 - DNA, 20 bp, synthetic construct
  source 1..20: mol_type = other DNA
gcctacaagtcagtggtgtg

SEQ ID NO: 6795 - DNA, 20 bp, synthetic construct
  source 1..20: mol_type = other DNA
tcccaggtcaatagagttat

SEQ ID NO: 6796 - DNA, 20 bp, synthetic construct
  source 1..20: mol_type = other DNA
gtgattctcatgcatagtgt

SEQ ID NO: 6797 - DNA, 20 bp, synthetic construct
  source 1..20: mol_type = other DNA
gtgggtgtaaccacagactc

SEQ ID NO: 6798 - DNA, 20 bp, synthetic construct
  source 1..20: mol_type = other DNA
ataaggcaatggcttacact

SEQ ID NO: 6799 - DNA, 20 bp, synthetic construct
  source 1..20: mol_type = other DNA
tatcagaggtacactttcca

SEQ ID NO: 6800 - DNA, 20 bp, synthetic construct
  source 1..20: mol_type = other DNA
gtcccttgccaaaattaact

SEQ ID NO: 6801 - DNA, 20 bp, synthetic construct
  source 1..20: mol_type = other DNA
catgcctccaaaaggcgggt

SEQ ID NO: 6802 - DNA, 20 bp, synthetic construct
  source 1..20: mol_type = other DNA
taccatagaaaccgggttaa

SEQ ID NO: 6803 - DNA, 20 bp, synthetic construct
  source 1..20: mol_type = other DNA
cactccagcactatagttgt

SEQ ID NO: 6804 - DNA, 20 bp, synthetic construct
  source 1..20: mol_type = other DNA
actgacttgtgaggtcactt

SEQ ID NO: 6805 - DNA, 20 bp, synthetic construct
  source 1..20: mol_type = other DNA
tggtttgggctgtctttatt

SEQ ID NO: 6806 - DNA, 20 bp, synthetic construct
  source 1..20: mol_type = other DNA
aaggacgcctgagaaatacg

SEQ ID NO: 6807 - DNA, 20 bp, synthetic construct
  source 1..20: mol_type = other DNA
tttggagaggagattactgt

SEQ ID NO: 6808 - DNA, 20 bp, synthetic construct
  source 1..20: mol_type = other DNA
aaagctctaggtggctgata

SEQ ID NO: 6809 - DNA, 20 bp, synthetic construct
  source 1..20: mol_type = other DNA
tccaaacttgtgccttgtta

SEQ ID NO: 6810 - DNA, 20 bp, synthetic construct
  source 1..20: mol_type = other DNA
cctacaccctggtgtaacct

SEQ ID NO: 6811 - DNA, 20 bp, synthetic construct
  source 1..20: mol_type = other DNA
ctgctcactgtgcatataaa

SEQ ID NO: 6812 - DNA, 20 bp, synthetic construct
  source 1..20: mol_type = other DNA
acaccaagcaagttccacct

SEQ ID NO: 6813 - DNA, 20 bp, synthetic construct
  source 1..20: mol_type = other DNA
agcatggtagtgatcaccaa

SEQ ID NO: 6814 - DNA, 20 bp, synthetic construct
  source 1..20: mol_type = other DNA
aatcctgaatcttgagctga

SEQ ID NO: 6815 - DNA, 20 bp, synthetic construct
  source 1..20: mol_type = other DNA
gggtgatgttattagggtga

SEQ ID NO: 6816 - DNA, 20 bp, synthetic construct
  source 1..20: mol_type = other DNA
aagaaatggagtaagtcacc

SEQ ID NO: 6817 - DNA, 20 bp, synthetic construct
  source 1..20: mol_type = other DNA
tgaggcatagcagtctctcc

SEQ ID NO: 6818 - DNA, 20 bp, synthetic construct
  source 1..20: mol_type = other DNA
gcaagattgaagaggagact

SEQ ID NO: 6819 - DNA, 20 bp, synthetic construct
  source 1..20: mol_type = other DNA
agtccaatacgctagggcag

SEQ ID NO: 6820 - DNA, 20 bp, synthetic construct
  source 1..20: mol_type = other DNA
aattactctgaacctgacgg

SEQ ID NO: 6821 - DNA, 20 bp, synthetic construct
  source 1..20: mol_type = other DNA
ccacgggagccaatgaggaa

SEQ ID NO: 6822 - DNA, 20 bp, synthetic construct
  source 1..20: mol_type = other DNA
gaaaactggtttagcgccac

SEQ ID NO: 6823 - DNA, 20 bp, synthetic construct
  source 1..20: mol_type = other DNA
ataccgctccacctaaagct

SEQ ID NO: 6824 - DNA, 20 bp, synthetic construct
  source 1..20: mol_type = other DNA
caaagcatacatgggctaat

SEQ ID NO: 6825 - DNA, 20 bp, synthetic construct
  source 1..20: mol_type = other DNA
cctcccattaggcttgcttg

SEQ ID NO: 6826 - DNA, 20 bp, synthetic construct
  source 1..20: mol_type = other DNA
catccacatggcaggtgaat

SEQ ID NO: 6827 - DNA, 20 bp, synthetic construct
  source 1..20: mol_type = other DNA
gagaggtcagagtactgtaa

SEQ ID NO: 6828 - DNA, 20 bp, synthetic construct
  source 1..20: mol_type = other DNA
tgtttcttgagtggatggtt

SEQ ID NO: 6829 - DNA, 20 bp, synthetic construct
  source 1..20: mol_type = other DNA
agctcacctggtgggccgga

SEQ ID NO: 6830 - DNA, 20 bp, synthetic construct
  source 1..20: mol_type = other DNA
catcaccaaggtatttagtc

SEQ ID NO: 6831 - DNA, 20 bp, synthetic construct
  source 1..20: mol_type = other DNA
gcttcattcctgattccagc

SEQ ID NO: 6832 - DNA, 20 bp, synthetic construct
  source 1..20: mol_type = other DNA
ctggttgaacctattctcaa

SEQ ID NO: 6833 - DNA, 20 bp, synthetic construct
  source 1..20: mol_type = other DNA
gtctgtgttcttgaccctat

SEQ ID NO: 6834 - DNA, 20 bp, synthetic construct
  source 1..20: mol_type = other DNA
tagttgctttgctgagattc

SEQ ID NO: 6835 - DNA, 20 bp, synthetic construct
  source 1..20: mol_type = other DNA
accacttttgtaaccatcac

SEQ ID NO: 6836 - DNA, 20 bp, synthetic construct
  source 1..20: mol_type = other DNA
gttgctgcagataattggtt

SEQ ID NO: 6837 - DNA, 20 bp, synthetic construct
  source 1..20: mol_type = other DNA
aagtttattgagagcctcct

SEQ ID NO: 6838 - DNA, 20 bp, synthetic construct
  source 1..20: mol_type = other DNA
gtagctcaacttgggcttag

SEQ ID NO: 6839 - DNA, 20 bp, synthetic construct
  source 1..20: mol_type = other DNA
tagagacaactggcaatagt

SEQ ID NO: 6840 - DNA, 20 bp, synthetic construct
  source 1..20: mol_type = other DNA
tgctccacaccaaatgccat

SEQ ID NO: 6841 - DNA, 20 bp, synthetic construct
  source 1..20: mol_type = other DNA
gccacgcgtctgatcccaaa

SEQ ID NO: 6842 - DNA, 20 bp, synthetic construct
  source 1..20: mol_type = other DNA
gataatgaagaccttagccc

SEQ ID NO: 6843 - DNA, 20 bp, synthetic construct
  source 1..20: mol_type = other DNA
aaccacaaacacgtcataca

SEQ ID NO: 6844 - DNA, 20 bp, synthetic construct
  source 1..20: mol_type = other DNA
ctaaaaaggaccacaggttt

SEQ ID NO: 6845 - DNA, 20 bp, synthetic construct
  source 1..20: mol_type = other DNA
caggacgtggatatgaagcc

SEQ ID NO: 6846 - DNA, 20 bp, synthetic construct
  source 1..20: mol_type = other DNA
ttaaggtggcagaagtgaat

SEQ ID NO: 6847 - DNA, 20 bp, synthetic construct
  source 1..20: mol_type = other DNA
ggagaggttgaaatatacac

SEQ ID NO: 6848 - DNA, 20 bp, synthetic construct
  source 1..20: mol_type = other DNA
atgctcatagctacttggac

SEQ ID NO: 6849 - DNA, 20 bp, synthetic construct
  source 1..20: mol_type = other DNA
tgtgatgtgagtgtgagatt

SEQ ID NO: 6850 - DNA, 20 bp, synthetic construct
  source 1..20: mol_type = other DNA
gtgcctaagaggtattcaag

SEQ ID NO: 6851 - DNA, 20 bp, synthetic construct
  source 1..20: mol_type = other DNA
gagccacagcctctggcaag

SEQ ID NO: 6852 - DNA, 20 bp, synthetic construct
  source 1..20: mol_type = other DNA
tgtgtgtggagcattaccta

SEQ ID NO: 6853 - DNA, 20 bp, synthetic construct
  source 1..20: mol_type = other DNA
gccacacttgtattcatggc

SEQ ID NO: 6854 - DNA, 20 bp, synthetic construct
  source 1..20: mol_type = other DNA
ggtttcttcctgaccggatc

SEQ ID NO: 6855 - DNA, 20 bp, synthetic construct
  source 1..20: mol_type = other DNA
gttacacgtgctcaatacat

SEQ ID NO: 6856 - DNA, 20 bp, synthetic construct
  source 1..20: mol_type = other DNA
atatctgatgtactctggtg

SEQ ID NO: 6857 - DNA, 20 bp, synthetic construct
  source 1..20: mol_type = other DNA
caagattagccaggagttgg

SEQ ID NO: 6858 - DNA, 20 bp, synthetic construct
  source 1..20: mol_type = other DNA
aattgctgggacaaagcctt

SEQ ID NO: 6859 - DNA, 20 bp, synthetic construct
  source 1..20: mol_type = other DNA
ttcccattgatccacttatg

SEQ ID NO: 6860 - DNA, 20 bp, synthetic construct
  source 1..20: mol_type = other DNA
aagcattaggacaatcggta

SEQ ID NO: 6861 - DNA, 20 bp, synthetic construct
  source 1..20: mol_type = other DNA
cgtgaactctgaccttagct

SEQ ID NO: 6862 - DNA, 20 bp, synthetic construct
  source 1..20: mol_type = other DNA
accttgtcaccttaaccttt

SEQ ID NO: 6863 - DNA, 20 bp, synthetic construct
  source 1..20: mol_type = other DNA
attacttacccgagtccttc

SEQ ID NO: 6864 - DNA, 20 bp, synthetic construct
  source 1..20: mol_type = other DNA
atttttgtctctggtgcacg

SEQ ID NO: 6865 - DNA, 20 bp, synthetic construct
  source 1..20: mol_type = other DNA
tgagatgtgtcctttactgc

SEQ ID NO: 6866 - DNA, 20 bp, synthetic construct
  source 1..20: mol_type = other DNA
cgcaaaggctgtatattaca

SEQ ID NO: 6867 - DNA, 20 bp, synthetic construct
  source 1..20: mol_type = other DNA
cttcagagttgacagatacc

SEQ ID NO: 6868 - DNA, 20 bp, synthetic construct
  source 1..20: mol_type = other DNA
attccaggtggttctctttt

SEQ ID NO: 6869 - DNA, 20 bp, synthetic construct
  source 1..20: mol_type = other DNA
catgctgctcctttgggtga

SEQ ID NO: 6870 - DNA, 20 bp, synthetic construct
  source 1..20: mol_type = other DNA
tattcctttcaagcccaagg

SEQ ID NO: 6871 - DNA, 20 bp, synthetic construct
  source 1..20: mol_type = other DNA
tcaccctcttctcccagaac

SEQ ID NO: 6872 - DNA, 20 bp, synthetic construct
  source 1..20: mol_type = other DNA
ggaaaacctttgtcaaccaa

SEQ ID NO: 6873 - DNA, 20 bp, synthetic construct
  source 1..20: mol_type = other DNA
gctagaatgaccctctaaag

SEQ ID NO: 6874 - DNA, 20 bp, synthetic construct
  source 1..20: mol_type = other DNA
tcctacacctcaggaaatag

SEQ ID NO: 6875 - DNA, 20 bp, synthetic construct
  source 1..20: mol_type = other DNA
ttatgaagacactaatcccg

SEQ ID NO: 6876 - DNA, 20 bp, synthetic construct
  source 1..20: mol_type = other DNA
tcattgatgggtccctaata

SEQ ID NO: 6877 - DNA, 20 bp, synthetic construct
  source 1..20: mol_type = other DNA
gagcttcagagcaacataat

SEQ ID NO: 6878 - DNA, 20 bp, synthetic construct
  source 1..20: mol_type = other DNA
gtgacacaaacacataatgg

SEQ ID NO: 6879 - DNA, 20 bp, synthetic construct
  source 1..20: mol_type = other DNA
gctcaatattatggcctcat

SEQ ID NO: 6880 - DNA, 20 bp, synthetic construct
  source 1..20: mol_type = other DNA
tccgctcaggactgcatcac

SEQ ID NO: 6881 - DNA, 20 bp, synthetic construct
  source 1..20: mol_type = other DNA
tttgtggtttttacgtggca

SEQ ID NO: 6882 - DNA, 20 bp, synthetic construct
  source 1..20: mol_type = other DNA
aatagagacttgcacccgaa

SEQ ID NO: 6883 - DNA, 20 bp, synthetic construct
  source 1..20: mol_type = other DNA
tcacttattgcttatgcctg

SEQ ID NO: 6884 - DNA, 20 bp, synthetic construct
  source 1..20: mol_type = other DNA
ggagaggtaccaattctgga

SEQ ID NO: 6885 - DNA, 20 bp, synthetic construct
  source 1..20: mol_type = other DNA
taacagcattgctggcaccc

SEQ ID NO: 6886 - DNA, 20 bp, synthetic construct
  source 1..20: mol_type = other DNA
atggccgtaagtgcggtggc

SEQ ID NO: 6887 - DNA, 20 bp, synthetic construct
  source 1..20: mol_type = other DNA
cacaggtagacttcactccc

SEQ ID NO: 6888 - DNA, 20 bp, synthetic construct
  source 1..20: mol_type = other DNA
tactgcaggtaccagtatga

SEQ ID NO: 6889 - DNA, 20 bp, synthetic construct
  source 1..20: mol_type = other DNA
cctgtcaacccttcctcatg

SEQ ID NO: 6890 - DNA, 20 bp, synthetic construct
  source 1..20: mol_type = other DNA
tcgtggacaaaatccaggag

SEQ ID NO: 6891 - DNA, 20 bp, synthetic construct
  source 1..20: mol_type = other DNA
ggatccacattgacatatgt

SEQ ID NO: 6892 - DNA, 20 bp, synthetic construct
  source 1..20: mol_type = other DNA
cagactcttaaaaagtggcc

SEQ ID NO: 6893 - DNA, 20 bp, synthetic construct
  source 1..20: mol_type = other DNA
ctgaaccaccatgatcatta

SEQ ID NO: 6894 - DNA, 20 bp, synthetic construct
  source 1..20: mol_type = other DNA
gcccaatccctgaaaagttc

SEQ ID NO: 6895 - DNA, 20 bp, synthetic construct
  source 1..20: mol_type = other DNA
gagctgtccaggattaactg

SEQ ID NO: 6896 - DNA, 20 bp, synthetic construct
  source 1..20: mol_type = other DNA
aaatgaggttaggattaggc

SEQ ID NO: 6897 - DNA, 20 bp, synthetic construct
  source 1..20: mol_type = other DNA
gtcatatgattggctcatac

SEQ ID NO: 6898 - DNA, 20 bp, synthetic construct
  source 1..20: mol_type = other DNA
aagggacaaatcataacgct

SEQ ID NO: 6899 - DNA, 20 bp, synthetic construct
  source 1..20: mol_type = other DNA
ttgtagaaaacctctcgtct

SEQ ID NO: 6900 - DNA, 20 bp, synthetic construct
  source 1..20: mol_type = other DNA
gtgtttagagcaagacctag

SEQ ID NO: 6901 - DNA, 20 bp, synthetic construct
  source 1..20: mol_type = other DNA
aaacaacgagtaccttgtgc

SEQ ID NO: 6902 - DNA, 20 bp, synthetic construct
  source 1..20: mol_type = other DNA
acggatgcgtgagcaaaggt

SEQ ID NO: 6903 - DNA, 20 bp, synthetic construct
  source 1..20: mol_type = other DNA
atacagttctcctatcaagg

SEQ ID NO: 6904 - DNA, 20 bp, synthetic construct
  source 1..20: mol_type = other DNA
cagcgagcaggtgtacgccc

SEQ ID NO: 6905 - DNA, 20 bp, synthetic construct
  source 1..20: mol_type = other DNA
cgatcttgccacgattgcct

SEQ ID NO: 6906 - DNA, 20 bp, synthetic construct
  source 1..20: mol_type = other DNA
gaaggttcgaaaccagtaaa

SEQ ID NO: 6907 - DNA, 20 bp, synthetic construct
  source 1..20: mol_type = other DNA
gcgagcgtcgcagattaact

SEQ ID NO: 6908 - DNA, 20 bp, synthetic construct
  source 1..20: mol_type = other DNA
ggttgcgatctatattcgga

SEQ ID NO: 6909 - DNA, 20 bp, synthetic construct
  source 1..20: mol_type = other DNA
tcaacgcaggtcgctcacga

SEQ ID NO: 6910 - DNA, 20 bp, synthetic construct
  source 1..20: mol_type = other DNA
tgcgaggtggaaaagtcaca

SEQ ID NO: 6911 - DNA, 20 bp, synthetic construct
  source 1..20: mol_type = other DNA
aaccagtaaaaagacgcgat

SEQ ID NO: 6912 - DNA, 20 bp, synthetic construct
  source 1..20: mol_type = other DNA
actagtcggaggtctaattt

SEQ ID NO: 6913 - DNA, 20 bp, synthetic construct
  source 1..20: mol_type = other DNA
ataggagcgaccgattacgt

SEQ ID NO: 6914 - DNA, 20 bp, synthetic construct
  source 1..20: mol_type = other DNA
caggtcgcagataaatgtgg

SEQ ID NO: 6915 - DNA, 20 bp, synthetic construct
  source 1..20: mol_type = other DNA
cgctggtgccacacgactac

SEQ ID NO: 6916 - DNA, 20 bp, synthetic construct
  source 1..20: mol_type = other DNA
gacagtattgtgcttgacgt

SEQ ID NO: 6917 - DNA, 20 bp, synthetic construct
  source 1..20: mol_type = other DNA
gctaactcttttcataaccc

SEQ ID NO: 6918 - DNA, 20 bp, synthetic construct
  source 1..20: mol_type = other DNA
gtattcgttttgagcgctga

SEQ ID NO: 6919 - DNA, 20 bp, synthetic construct
  source 1..20: mol_type = other DNA
tcagaaggttcgaaaccagt

SEQ ID NO: 6920 - DNA, 20 bp, synthetic construct
  source 1..20: mol_type = other DNA
tggacgcgcatgattgagtt

SEQ ID NO: 6921 - DNA, 20 bp, synthetic construct
  source 1..20: mol_type = other DNA
aaacaacgagtaccttgtgc

SEQ ID NO: 6922 - DNA, 20 bp, synthetic construct
  source 1..20: mol_type = other DNA
acggatgcgtgagcaaaggt

SEQ ID NO: 6923 - DNA, 20 bp, synthetic construct
  source 1..20: mol_type = other DNA
atacagttctcctatcaagg

SEQ ID NO: 6924 - DNA, 20 bp, synthetic construct
  source 1..20: mol_type = other DNA
cagcgagcaggtgtacgccc

SEQ ID NO: 6925 - DNA, 20 bp, synthetic construct
  source 1..20: mol_type = other DNA
cgatcttgccacgattgcct

SEQ ID NO: 6926 - DNA, 20 bp, synthetic construct
  source 1..20: mol_type = other DNA
gaaggttcgaaaccagtaaa

SEQ ID NO: 6927 - DNA, 20 bp, synthetic construct
  source 1..20: mol_type = other DNA
gcgagcgtcgcagattaact

SEQ ID NO: 6928 - DNA, 20 bp, synthetic construct
  source 1..20: mol_type = other DNA
ggttgcgatctatattcgga

SEQ ID NO: 6929 - DNA, 20 bp, synthetic construct
  source 1..20: mol_type = other DNA
tcaacgcaggtcgctcacga

SEQ ID NO: 6930 - DNA, 20 bp, synthetic construct
  source 1..20: mol_type = other DNA
tgcgaggtggaaaagtcaca

SEQ ID NO: 6931 - DNA, 20 bp, synthetic construct
  source 1..20: mol_type = other DNA
aagaactcgtaagtaagccg

SEQ ID NO: 6932 - DNA, 20 bp, synthetic construct
  source 1..20: mol_type = other DNA
actgctagggactggtaaaa

SEQ ID NO: 6933 - DNA, 20 bp, synthetic construct
  source 1..20: mol_type = other DNA
atcactgaattgcgggaatc

SEQ ID NO: 6934 - DNA, 20 bp, synthetic construct
  source 1..20: mol_type = other DNA
cattcctattgttttcccga

SEQ ID NO: 6935 - DNA, 20 bp, synthetic construct
  source 1..20: mol_type = other DNA
cgggtgaccaatgaccatat

SEQ ID NO: 6936 - DNA, 20 bp, synthetic construct
  source 1..20: mol_type = other DNA
gacgcgactgctagggactg

SEQ ID NO: 6937 - DNA, 20 bp, synthetic construct
  source 1..20: mol_type = other DNA
gctcttcgacgttatagata

SEQ ID NO: 6938 - DNA, 20 bp, synthetic construct
  source 1..20: mol_type = other DNA
gtccgggttattatcgtcgc

SEQ ID NO: 6939 - DNA, 20 bp, synthetic construct
  source 1..20: mol_type = other DNA
tcataccgaagcaattctgt

SEQ ID NO: 6940 - DNA, 20 bp, synthetic construct
  source 1..20: mol_type = other DNA
tgggctcgattgatggatac

SEQ ID NO: 6941 - DNA, 20 bp, synthetic construct
  source 1..20: mol_type = other DNA
aaacaacgagtaccttgtgc

SEQ ID NO: 6942 - DNA, 20 bp, synthetic construct
  source 1..20: mol_type = other DNA
acggatgcgtgagcaaaggt

SEQ ID NO: 6943 - DNA, 20 bp, synthetic construct
  source 1..20: mol_type = other DNA
atacagttctcctatcaagg

SEQ ID NO: 6944 - DNA, 20 bp, synthetic construct
  source 1..20: mol_type = other DNA
cagcgagcaggtgtacgccc

SEQ ID NO: 6945 - DNA, 20 bp, synthetic construct
  source 1..20: mol_type = other DNA
cgatcttgccacgattgcct

SEQ ID NO: 6946 - DNA, 20 bp, synthetic construct
  source 1..20: mol_type = other DNA
gaaggttcgaaaccagtaaa

SEQ ID NO: 6947 - DNA, 20 bp, synthetic construct
  source 1..20: mol_type = other DNA
gcgagcgtcgcagattaact

SEQ ID NO: 6948 - DNA, 20 bp, synthetic construct
  source 1..20: mol_type = other DNA
ggttgcgatctatattcgga

SEQ ID NO: 6949 - DNA, 20 bp, synthetic construct
  source 1..20: mol_type = other DNA
tcaacgcaggtcgctcacga

SEQ ID NO: 6950 - DNA, 20 bp, synthetic construct
  source 1..20: mol_type = other DNA
tgcgaggtggaaaagtcaca

SEQ ID NO: 6951 - DNA, 20 bp, synthetic construct
  source 1..20: mol_type = other DNA
aagctactggtcggacccat

SEQ ID NO: 6952 - DNA, 20 bp, synthetic construct
  source 1..20: mol_type = other DNA
agagagaggttaataaggcc

SEQ ID NO: 6953 - DNA, 20 bp, synthetic construct
  source 1..20: mol_type = other DNA
atcgtaactcgggtgaccaa

SEQ ID NO: 6954 - DNA, 20 bp, synthetic construct
  source 1..20: mol_type = other DNA
ccatatgagggcgctgagca

SEQ ID NO: 6955 - DNA, 20 bp, synthetic construct
  source 1..20: mol_type = other DNA
cgtactgtaggcggcccaaa

SEQ ID NO: 6956 - DNA, 20 bp, synthetic construct
  source 1..20: mol_type = other DNA
gagagaggttaataaggcct

SEQ ID NO: 6957 - DNA, 20 bp, synthetic construct
  source 1..20: mol_type = other DNA
gcttgtacgatgtgtttgca

SEQ ID NO: 6958 - DNA, 20 bp, synthetic construct
  source 1..20: mol_type = other DNA
gtcgttaagagggaaatcgc

SEQ ID NO: 6959 - DNA, 20 bp, synthetic construct
  source 1..20: mol_type = other DNA
tccgcgagttccgcccaata

SEQ ID NO: 6960 - DNA, 20 bp, synthetic construct
  source 1..20: mol_type = other DNA
tgtagagggcctaacgagtt

SEQ ID NO: 6961 - DNA, 20 bp, synthetic construct
  source 1..20: mol_type = other DNA
aaacaacgagtaccttgtgc

SEQ ID NO: 6962 - DNA, 20 bp, synthetic construct
  source 1..20: mol_type = other DNA
acggatgcgtgagcaaaggt

SEQ ID NO: 6963 - DNA, 20 bp, synthetic construct
  source 1..20: mol_type = other DNA
atacagttctcctatcaagg

SEQ ID NO: 6964 - DNA, 20 bp, synthetic construct
  source 1..20: mol_type = other DNA
cagcgagcaggtgtacgccc

SEQ ID NO: 6965 - DNA, 20 bp, synthetic construct
  source 1..20: mol_type = other DNA
cgatcttgccacgattgcct

SEQ ID NO: 6966 - DNA, 20 bp, synthetic construct
  source 1..20: mol_type = other DNA
gaaggttcgaaaccagtaaa

SEQ ID NO: 6967 - DNA, 20 bp, synthetic construct
  source 1..20: mol_type = other DNA
gcgagcgtcgcagattaact

SEQ ID NO: 6968 - DNA, 20 bp, synthetic construct
  source 1..20: mol_type = other DNA
ggttgcgatctatattcgga

SEQ ID NO: 6969 - DNA, 20 bp, synthetic construct
  source 1..20: mol_type = other DNA
tcaacgcaggtcgctcacga

SEQ ID NO: 6970 - DNA, 20 bp, synthetic construct
  source 1..20: mol_type = other DNA
tgcgaggtggaaaagtcaca

SEQ ID NO: 6971 - DNA, 20 bp, synthetic construct
  source 1..20: mol_type = other DNA
aataaacacaaagccgcgta

SEQ ID NO: 6972 - DNA, 20 bp, synthetic construct
  source 1..20: mol_type = other DNA
agcaggagcatatgttgctc

SEQ ID NO: 6973 - DNA, 20 bp, synthetic construct
  source 1..20: mol_type = other DNA
atgcatcattcgctgaggga

SEQ ID NO: 6974 - DNA, 20 bp, synthetic construct
  source 1..20: mol_type = other DNA
cccgaagctctaactgcatt

SEQ ID NO: 6975 - DNA, 20 bp, synthetic construct
  source 1..20: mol_type = other DNA
cgtgcgattcgtgccactcg

SEQ ID NO: 6976 - DNA, 20 bp, synthetic construct
  source 1..20: mol_type = other DNA
gaggacaaatgcggtctgat

SEQ ID NO: 6977 - DNA, 20 bp, synthetic construct
  source 1..20: mol_type = other DNA
ggacttctcggaacggtcct

SEQ ID NO: 6978 - DNA, 20 bp, synthetic construct
  source 1..20: mol_type = other DNA
gtggtagaaatatgctgcag

SEQ ID NO: 6979 - DNA, 20 bp, synthetic construct
  source 1..20: mol_type = other DNA
tcgcaacggttgttaatatg

SEQ ID NO: 6980 - DNA, 20 bp, synthetic construct
  source 1..20: mol_type = other DNA
tgttaatatgacaggccgct

SEQ ID NO: 6981 - DNA, 20 bp, synthetic construct
  source 1..20: mol_type = other DNA
aaacaacgagtaccttgtgc

SEQ ID NO: 6982 - DNA, 20 bp, synthetic construct
  source 1..20: mol_type = other DNA
acggatgcgtgagcaaaggt

SEQ ID NO: 6983 - DNA, 20 bp, synthetic construct
  source 1..20: mol_type = other DNA
atacagttctcctatcaagg

SEQ ID NO: 6984 - DNA, 20 bp, synthetic construct
  source 1..20: mol_type = other DNA
cagcgagcaggtgtacgccc

SEQ ID NO: 6985 - DNA, 20 bp, synthetic construct
  source 1..20: mol_type = other DNA
cgatcttgccacgattgcct

SEQ ID NO: 6986 - DNA, 20 bp, synthetic construct
  source 1..20: mol_type = other DNA
gaaggttcgaaaccagtaaa

SEQ ID NO: 6987 - DNA, 20 bp, synthetic construct
  source 1..20: mol_type = other DNA
gcgagcgtcgcagattaact

SEQ ID NO: 6988 - DNA, 20 bp, synthetic construct
  source 1..20: mol_type = other DNA
ggttgcgatctatattcgga

SEQ ID NO: 6989 - DNA, 20 bp, synthetic construct
  source 1..20: mol_type = other DNA
tcaacgcaggtcgctcacga

SEQ ID NO: 6990 - DNA, 20 bp, synthetic construct
  source 1..20: mol_type = other DNA
tgcgaggtggaaaagtcaca

SEQ ID NO: 6991 - DNA, 20 bp, synthetic construct
  source 1..20: mol_type = other DNA
aattgcgggaatcggcattt

SEQ ID NO: 6992 - DNA, 20 bp, synthetic construct
  source 1..20: mol_type = other DNA
agcgcacttctgcataacta

SEQ ID NO: 6993 - DNA, 20 bp, synthetic construct
  source 1..20: mol_type = other DNA
atggtcggtcattgccgcaa

SEQ ID NO: 6994 - DNA, 20 bp, synthetic construct
  source 1..20: mol_type = other DNA
cccttcgatgcatccgaatg

SEQ ID NO: 6995 - DNA, 20 bp, synthetic construct
  source 1..20: mol_type = other DNA
ctacttaggagttgtggata

SEQ ID NO: 6996 - DNA, 20 bp, synthetic construct
  source 1..20: mol_type = other DNA
gagttaacggagacccgcca

SEQ ID NO: 6997 - DNA, 20 bp, synthetic construct
  source 1..20: mol_type = other DNA
ggatgcccaagattgtagag

SEQ ID NO: 6998 - DNA, 20 bp, synthetic construct
  source 1..20: mol_type = other DNA
gtgttcagacgtcgttctac

SEQ ID NO: 6999 - DNA, 20 bp, synthetic construct
  source 1..20: mol_type = other DNA
tcgtaaagtaggcgagcgtt

SEQ ID NO: 7000 - DNA, 20 bp, synthetic construct
  source 1..20: mol_type = other DNA
ttaacaacccgcgggccgaa

SEQ ID NO: 7001 - DNA, 20 bp, synthetic construct
  source 1..20: mol_type = other DNA
aaacaacgagtaccttgtgc

SEQ ID NO: 7002 - DNA, 20 bp, synthetic construct
  source 1..20: mol_type = other DNA
acggatgcgtgagcaaaggt

SEQ ID NO: 7003 - DNA, 20 bp, synthetic construct
  source 1..20: mol_type = other DNA
atacagttctcctatcaagg

SEQ ID NO: 7004 - DNA, 20 bp, synthetic construct
  source 1..20: mol_type = other DNA
cagcgagcaggtgtacgccc

SEQ ID NO: 7005 - DNA, 20 bp, synthetic construct
  source 1..20: mol_type = other DNA
cgatcttgccacgattgcct

SEQ ID NO: 7006 - DNA, 20 bp, synthetic construct
  source 1..20: mol_type = other DNA
gaaggttcgaaaccagtaaa

SEQ ID NO: 7007 - DNA, 20 bp, synthetic construct
  source 1..20: mol_type = other DNA
gcgagcgtcgcagattaact

SEQ ID NO: 7008 - DNA, 20 bp, synthetic construct
  source 1..20: mol_type = other DNA
ggttgcgatctatattcgga

SEQ ID NO: 7009 - DNA, 20 bp, synthetic construct
  source 1..20: mol_type = other DNA
tcaacgcaggtcgctcacga

SEQ ID NO: 7010 - DNA, 20 bp, synthetic construct
  source 1..20: mol_type = other DNA
tgcgaggtggaaaagtcaca

SEQ ID NO: 7011 - DNA, 20 bp, synthetic construct
  source 1..20: mol_type = other DNA
acacaaagccgcgtagttat

SEQ ID NO: 7012 - DNA, 20 bp, synthetic construct
  source 1..20: mol_type = other DNA
aggcaagagtttgtgggcgc

SEQ ID NO: 7013 - DNA, 20 bp, synthetic construct
  source 1..20: mol_type = other DNA
atttccgttagagccgagtg

SEQ ID NO: 7014 - DNA, 20 bp, synthetic construct
  source 1..20: mol_type = other DNA
ccggcagcgttccgttacat

SEQ ID NO: 7015 - DNA, 20 bp, synthetic construct
  source 1..20: mol_type = other DNA
ctcagagataacgcatatct

SEQ ID NO: 7016 - DNA, 20 bp, synthetic construct
  source 1..20: mol_type = other DNA
gatgcccaagattgtagagg

SEQ ID NO: 7017 - DNA, 20 bp, synthetic construct
  source 1..20: mol_type = other DNA
ggcggaagtgaacacgcttg

SEQ ID NO: 7018 - DNA, 20 bp, synthetic construct
  source 1..20: mol_type = other DNA
gttgggacgcttgaagcgca

SEQ ID NO: 7019 - DNA, 20 bp, synthetic construct
  source 1..20: mol_type = other DNA
tctcgccttagatccggcgg

SEQ ID NO: 7020 - DNA, 20 bp, synthetic construct
  source 1..20: mol_type = other DNA
ttagggcggtagagagaatt

SEQ ID NO: 7021 - DNA, 40 bp, synthetic construct
  source 1..40: mol_type = other DNA
agacacagtagcccaggctaggcaaaggctgagccatacc

SEQ ID NO: 7022 - DNA, 40 bp, synthetic construct
  source 1..40: mol_type = other DNA
ccataggaagaattccatacctgggaaggaatcattcaca

SEQ ID NO: 7023 - DNA, 40 bp, synthetic construct
  source 1..40: mol_type = other DNA
gctgtctttttgtcccattctgtgcttcgtcacccacgta

SEQ ID NO: 7024 - DNA, 40 bp, synthetic construct
  source 1..40: mol_type = other DNA
gcagagctaatagcagtagaggtttcctggtcatgaccgg

SEQ ID NO: 7025 - DNA, 40 bp, synthetic construct
  source 1..40: mol_type = other DNA
ggtgatcagttggtgtcatgggaggaggctctgagttagt

SEQ ID NO: 7026 - DNA, 40 bp, synthetic construct
  source 1..40: mol_type = other DNA
gctagcaccttcttttctagtgatgtgcttgtcttccata

SEQ ID NO: 7027 - DNA, 40 bp, synthetic construct
  source 1..40: mol_type = other DNA
cctcacgtcgctgaataattctgaaaatcaacgctgccat

SEQ ID NO: 7028 - DNA, 40 bp, synthetic construct
  source 1..40: mol_type = other DNA
acacagtctatgtggccagccttgcagaaccagttccctc

SEQ ID NO: 7029 - DNA, 40 bp, synthetic construct
  source 1..40: mol_type = other DNA
tgaaggtcagcttttcagtcgcaaaagtgcctcaatccat

SEQ ID NO: 7030 - DNA, 40 bp, synthetic construct
  source 1..40: mol_type = other DNA
atcccaggcacttgcgcaggcacaaagcaattacggtaga

SEQ ID NO: 7031 - DNA, 40 bp, synthetic construct
  source 1..40: mol_type = other DNA
atgcagagcagacagatgcaccaactccaaagagacatat

SEQ ID NO: 7032 - DNA, 40 bp, synthetic construct
  source 1..40: mol_type = other DNA
tcaagtcgatgttgctgtccctcttcatcttccacaatag

SEQ ID NO: 7033 - DNA, 40 bp, synthetic construct
  source 1..40: mol_type = other DNA
gtgtgggcgctgaccttgcgtgcgctctttgaccgcgcgc

SEQ ID NO: 7034 - DNA, 40 bp, synthetic construct
  source 1..40: mol_type = other DNA
atgttgctgctgttcatcatgacctctttgcttaacttga

SEQ ID NO: 7035 - DNA, 40 bp, synthetic construct
  source 1..40: mol_type = other DNA
acaaaaggtggaaatgaggcgcaatacctggcttttctca

SEQ ID NO: 7036 - DNA, 40 bp, synthetic construct
  source 1..40: mol_type = other DNA
ttggccttcctcttggccgttcttcgtcttggccctcgac

SEQ ID NO: 7037 - DNA, 40 bp, synthetic construct
  source 1..40: mol_type = other DNA
gccaaagcaaatggcacagatggttgtggtcatagcgccg

SEQ ID NO: 7038 - DNA, 40 bp, synthetic construct
  source 1..40: mol_type = other DNA
ggtgagaaaccgttcaggtattgtcgatagcaccatcagg

SEQ ID NO: 7039 - DNA, 40 bp, synthetic construct
  source 1..40: mol_type = other DNA
cttagccgcgatggtctcattcctcagcttcagaaatgtt

SEQ ID NO: 7040 - DNA, 40 bp, synthetic construct
  source 1..40: mol_type = other DNA
cacttcatgctgctgctgtggagggtctctgtctttagag

SEQ ID NO: 7041 - DNA, 40 bp, synthetic construct
  source 1..40: mol_type = other DNA
tgttcatgatgctgtatgggcacaccaatggagaaatagt

SEQ ID NO: 7042 - DNA, 40 bp, synthetic construct
  source 1..40: mol_type = other DNA
acggaagtctggagtatcactctccaccacaggccaaaac

SEQ ID NO: 7043 - DNA, 40 bp, synthetic construct
  source 1..40: mol_type = other DNA
tcaaattcacccacccatcagtagctgaagccttgccggt

SEQ ID NO: 7044 - DNA, 40 bp, synthetic construct
  source 1..40: mol_type = other DNA
cccacaagttcccaatctgatcaacctggtcactctcatc

SEQ ID NO: 7045 - DNA, 40 bp, synthetic construct
  source 1..40: mol_type = other DNA
gcagtccaccgcataattatctgctgtcacagtgttgagg

SEQ ID NO: 7046 - DNA, 40 bp, synthetic construct
  source 1..40: mol_type = other DNA
tgttctgaccctggcatatcccctccttcaggacgggaat

SEQ ID NO: 7047 - DNA, 40 bp, synthetic construct
  source 1..40: mol_type = other DNA
aggcaagcacagcagaggtggacaatgcacatcaccaata

SEQ ID NO: 7048 - DNA, 40 bp, synthetic construct
  source 1..40: mol_type = other DNA
ccgtgtctcggcactgctgcggagcagaccacctcgtcac

SEQ ID NO: 7049 - DNA, 40 bp, synthetic construct
  source 1..40: mol_type = other DNA
ggtcctcttgttcctcctcagcagcggtcattcagatatg

SEQ ID NO: 7050 - DNA, 40 bp, synthetic construct
  source 1..40: mol_type = other DNA
cttccaactgtgtcaatgcatgtggcaaaggcaataaaag

SEQ ID NO: 7051 - DNA, 40 bp, synthetic construct
  source 1..40: mol_type = other DNA
catgatgccgagccgccacctccagcagacgccctcgacg

SEQ ID NO: 7052 - DNA, 40 bp, synthetic construct
  source 1..40: mol_type = other DNA
gatcatggagcctcgtgccaaaggtgagattctgcaggac

SEQ ID NO: 7053 - DNA, 40 bp, synthetic construct
  source 1..40: mol_type = other DNA
acactacacgcccagggctcagaggcaaaagattccagtt

SEQ ID NO: 7054 - DNA, 40 bp, synthetic construct
  source 1..40: mol_type = other DNA
ggaacacaggcgttttctgctcacctcgatggtgaacggt

SEQ ID NO: 7055 - DNA, 40 bp, synthetic construct
  source 1..40: mol_type = other DNA
tagcatcaatatgcatgggaaggtccaatgatgttgaagg

SEQ ID NO: 7056 - DNA, 40 bp, synthetic construct
  source 1..40: mol_type = other DNA
ggcaatagtcagggcagggcgcagcccttgagcacatttc

SEQ ID NO: 7057 - DNA, 40 bp, synthetic construct
  source 1..40: mol_type = other DNA
gcgtgggaaacctcgattctgtctctcggtgagggctagg

SEQ ID NO: 7058 - DNA, 40 bp, synthetic construct
  source 1..40: mol_type = other DNA
gaacagaacaaaggcaatacgctggtttaaaaccagcggc

SEQ ID NO: 7059 - DNA, 40 bp, synthetic construct
  source 1..40: mol_type = other DNA
aaagtctctgatatcggaagcagaatcctcttccatgctc

SEQ ID NO: 7060 - DNA, 40 bp, synthetic construct
  source 1..40: mol_type = other DNA
aagaaccataccactgtccggttttcagctcttctgaggc

SEQ ID NO: 7061 - DNA, 40 bp, synthetic construct
  source 1..40: mol_type = other DNA
acctgatgacatgtacacctttgtctcttgcaagcactgg

SEQ ID NO: 7062 - DNA, 40 bp, synthetic construct
  source 1..40: mol_type = other DNA
ctcccgggatcttgcatttcagattctgctgctaagaacc

SEQ ID NO: 7063 - DNA, 40 bp, synthetic construct
  source 1..40: mol_type = other DNA
acttcaataaaccggaacacgagcgaggagaagtgtctga

SEQ ID NO: 7064 - DNA, 40 bp, synthetic construct
  source 1..40: mol_type = other DNA
cagagggtagttaaactcctcccaagagatggacattgtc

SEQ ID NO: 7065 - DNA, 40 bp, synthetic construct
  source 1..40: mol_type = other DNA
agattgttgcagcggttcttctttattgatctcatagccc

SEQ ID NO: 7066 - DNA, 40 bp, synthetic construct
  source 1..40: mol_type = other DNA
cgttctcacaggcagagcaggtcttcattcacccagtacc

SEQ ID NO: 7067 - DNA, 40 bp, synthetic construct
  source 1..40: mol_type = other DNA
gatgaaaggccgctgtaccaagtctcaatgatgatcctct

SEQ ID NO: 7068 - DNA, 40 bp, synthetic construct
  source 1..40: mol_type = other DNA
tcttgacaaccaaggagtgacctgtgagttatccaccatt

SEQ ID NO: 7069 - DNA, 40 bp, synthetic construct
  source 1..40: mol_type = other DNA
ggatgccaccgagtaggtacgcaggtattgtagagtaagg

SEQ ID NO: 7070 - DNA, 40 bp, synthetic construct
  source 1..40: mol_type = other DNA
agaaggacatgtcaggtgggcttttgctcttaccgggctc

SEQ ID NO: 7071 - DNA, 40 bp, synthetic construct
  source 1..40: mol_type = other DNA
gtccacgggcgtgactttgtgagaaggagagcgcgttggg

SEQ ID NO: 7072 - DNA, 40 bp, synthetic construct
  source 1..40: mol_type = other DNA
ttgagatcatcactggctttcagtacattttcattgccca

SEQ ID NO: 7073 - DNA, 40 bp, synthetic construct
  source 1..40: mol_type = other DNA
attgtgttgtcccgtggccacacataggagaatgtactgt

SEQ ID NO: 7074 - DNA, 40 bp, synthetic construct
  source 1..40: mol_type = other DNA
aggtgtgacattactccagagagaccttggtgaatgtcag

SEQ ID NO: 7075 - DNA, 40 bp, synthetic construct
  source 1..40: mol_type = other DNA
gagcaagatttcctccaggttgggcctggttgaaaagcat

SEQ ID NO: 7076 - DNA, 40 bp, synthetic construct
  source 1..40: mol_type = other DNA
cctgatcagtcattttttgctttcattgcctggtagttca

SEQ ID NO: 7077 - DNA, 40 bp, synthetic construct
  source 1..40: mol_type = other DNA
agcattcagttctgacacactttatccacttagggatggt

SEQ ID NO: 7078 - DNA, 40 bp, synthetic construct
  source 1..40: mol_type = other DNA
ctgttttgcaaagagctagtcgagtggatgaggaatttct

SEQ ID NO: 7079 - DNA, 40 bp, synthetic construct
  source 1..40: mol_type = other DNA
tctagtgctttccaatgttgttggtttaatcccattgccc

SEQ ID NO: 7080 - DNA, 40 bp, synthetic construct
  source 1..40: mol_type = other DNA
accaggtcgtccagctcctggctggttgtccaaatcaaca

SEQ ID NO: 7081 - DNA, 40 bp, synthetic construct
  source 1..40: mol_type = other DNA
tgagcgatttcatcgtcaagtcttcagggcattgttcttc

SEQ ID NO: 7082 - DNA, 40 bp, synthetic construct
  source 1..40: mol_type = other DNA
gttttgagacaagtcgtagctcactgctgctttgaatggg

SEQ ID NO: 7083 - DNA, 40 bp, synthetic construct
  source 1..40: mol_type = other DNA
ctgccatattcagaactttcgatgttggcatcgttttcgg

SEQ ID NO: 7084 - DNA, 40 bp, synthetic construct
  source 1..40: mol_type = other DNA
gactcatcgttgtacatgagggtggtgattctcgagcacc

SEQ ID NO: 7085 - DNA, 40 bp, synthetic construct
  source 1..40: mol_type = other DNA
ggatgcggaatttcttcagctgtcaccatcgtgtccacag

SEQ ID NO: 7086 - DNA, 40 bp, synthetic construct
  source 1..40: mol_type = other DNA
ccacacatggagtaaagagcgttattccgcaatgaatgtc

SEQ ID NO: 7087 - DNA, 40 bp, synthetic construct
  source 1..40: mol_type = other DNA
ggatgaattcagctgcacaaccaaagcatctcagagaaaa

SEQ ID NO: 7088 - DNA, 40 bp, synthetic construct
  source 1..40: mol_type = other DNA
tggaatggtgatctcagttatgtgggtctgttactcggca

SEQ ID NO: 7089 - DNA, 40 bp, synthetic construct
  source 1..40: mol_type = other DNA
ggtgttgacttcattcagggtcacaggagatggttgagga

SEQ ID NO: 7090 - DNA, 40 bp, synthetic construct
  source 1..40: mol_type = other DNA
ctcacaggcaattcttgtcgccttcagaatgttggcgagt

SEQ ID NO: 7091 - DNA, 40 bp, synthetic construct
  source 1..40: mol_type = other DNA
aattgggtcgggaggatatcgcactgaagaggtatttact

SEQ ID NO: 7092 - DNA, 40 bp, synthetic construct
  source 1..40: mol_type = other DNA
ggccatgactcgctcagcagcacagttagttctgccttcg

SEQ ID NO: 7093 - DNA, 40 bp, synthetic construct
  source 1..40: mol_type = other DNA
aattgctctggtcacttctccccgccctgtgaaaagcaga

SEQ ID NO: 7094 - DNA, 40 bp, synthetic construct
  source 1..40: mol_type = other DNA
tctccacgtgtttgatggccccagtcggaaatccggtcct

SEQ ID NO: 7095 - DNA, 40 bp, synthetic construct
  source 1..40: mol_type = other DNA
caagttcaagtatttctcccgaagcagcaggtaaaagagg

SEQ ID NO: 7096 - DNA, 40 bp, synthetic construct
  source 1..40: mol_type = other DNA
tcgagagagggtgttggtcagccatggtctgcacggtgta

SEQ ID NO: 7097 - DNA, 40 bp, synthetic construct
  source 1..40: mol_type = other DNA
gcctttgttgactgccatcctctccatccagcaaggtgag

SEQ ID NO: 7098 - DNA, 40 bp, synthetic construct
  source 1..40: mol_type = other DNA
taaaagcatcattggttggcttcttcactagtcattccct

SEQ ID NO: 7099 - DNA, 40 bp, synthetic construct
  source 1..40: mol_type = other DNA
cctccagtagaaatcctagtgagtttcttctgtttctcca

SEQ ID NO: 7100 - DNA, 40 bp, synthetic construct
  source 1..40: mol_type = other DNA
ccaaacgtccctcaccttcccactcgagcagaacatttcc

SEQ ID NO: 7101 - DNA, 40 bp, synthetic construct
  source 1..40: mol_type = other DNA
tgtgccaagtagtagtgtgaactgcctcacactagtgagc

SEQ ID NO: 7102 - DNA, 40 bp, synthetic construct
  source 1..40: mol_type = other DNA
acctagaaggcctctacctggtgtaccttaaaagtgtctc

SEQ ID NO: 7103 - DNA, 40 bp, synthetic construct
  source 1..40: mol_type = other DNA
tttggttccaccacctttctcctatttccattgaccacaa

SEQ ID NO: 7104 - DNA, 40 bp, synthetic construct
  source 1..40: mol_type = other DNA
tttcagtccctcttttgaagtattatttctcggacccgtg

SEQ ID NO: 7105 - DNA, 40 bp, synthetic construct
  source 1..40: mol_type = other DNA
tgtccagagataagcagccatacaactggtggagaacggg

SEQ ID NO: 7106 - DNA, 40 bp, synthetic construct
  source 1..40: mol_type = other DNA
cccgaggtttcaaaggtgaaccactacagccgtattctcc

SEQ ID NO: 7107 - DNA, 40 bp, synthetic construct
  source 1..40: mol_type = other DNA
gaaaagtccggtcacgtcacccaacatgttggtgtttgca

SEQ ID NO: 7108 - DNA, 40 bp, synthetic construct
  source 1..40: mol_type = other DNA
tcccggaactgccaggcttgctgcagctcatgttgatctt

SEQ ID NO: 7109 - DNA, 40 bp, synthetic construct
  source 1..40: mol_type = other DNA
catacactgcatggtctccagcactccattctccagagga

SEQ ID NO: 7110 - DNA, 40 bp, synthetic construct
  source 1..40: mol_type = other DNA
gcatatcttccagaattcctctcattgtcaggatccacag

SEQ ID NO: 7111 - DNA, 40 bp, synthetic construct
  source 1..40: mol_type = other DNA
tatagtcactcattcctcctgtttctatggtaaccatcct

SEQ ID NO: 7112 - DNA, 40 bp, synthetic construct
  source 1..40: mol_type = other DNA
attctccttggtcttggctcgaggtcacgctctgtacaac

SEQ ID NO: 7113 - DNA, 40 bp, synthetic construct
  source 1..40: mol_type = other DNA
tgatctcaccaatgtccacggttggacattacctcgtggc

SEQ ID NO: 7114 - DNA, 40 bp, synthetic construct
  source 1..40: mol_type = other DNA
cttaccaccaaccaccctgggttaggacggagcctgaatc

SEQ ID NO: 7115 - DNA, 40 bp, synthetic construct
  source 1..40: mol_type = other DNA
ctccgaatggcgaggaagactcctttggaaagtggagcac

SEQ ID NO: 7116 - DNA, 40 bp, synthetic construct
  source 1..40: mol_type = other DNA
gcatgccaacattcaagcctagtatagagagcgctttgaa

SEQ ID NO: 7117 - DNA, 40 bp, synthetic construct
  source 1..40: mol_type = other DNA
tacagaagcccaaagtgcatgcaagattaagcagcaggca

SEQ ID NO: 7118 - DNA, 40 bp, synthetic construct
  source 1..40: mol_type = other DNA
ccatcatccgccttgaatgctcatgattgctttacatggg

SEQ ID NO: 7119 - DNA, 40 bp, synthetic construct
  source 1..40: mol_type = other DNA
tctggtccactaggcaggccgcggcagtccagacgaaggc

SEQ ID NO: 7120 - DNA, 40 bp, synthetic construct
  source 1..40: mol_type = other DNA
aaatccctaagtcactcgccgcttcatatacgtgagacac

SEQ ID NO: 7121 - DNA, 40 bp, synthetic construct
  source 1..40: mol_type = other DNA
taacagcctactctgggagccctttcccatcttatctcca

SEQ ID NO: 7122 - DNA, 40 bp, synthetic construct
  source 1..40: mol_type = other DNA
cgggttcattttgcagcgatcaggtgcctccgttaaggca

SEQ ID NO: 7123 - DNA, 40 bp, synthetic construct
  source 1..40: mol_type = other DNA
atcgatttggacatgctgtttcaggcttggaaacatccac

SEQ ID NO: 7124 - DNA, 40 bp, synthetic construct
  source 1..40: mol_type = other DNA
agtggactcctgctttgccttgcacctgtctccggtactc

SEQ ID NO: 7125 - DNA, 40 bp, synthetic construct
  source 1..40: mol_type = other DNA
ccatcaaaggtcacgatgtgcagtcagcttgaaattctgc

SEQ ID NO: 7126 - DNA, 40 bp, synthetic construct
  source 1..40: mol_type = other DNA
ttgggcatgtttgctatctcgcagagatgcgggctcactg

SEQ ID NO: 7127 - DNA, 40 bp, synthetic construct
  source 1..40: mol_type = other DNA
acatgcattgcttcagaagataaatggaatgaggtgacct

SEQ ID NO: 7128 - DNA, 40 bp, synthetic construct
  source 1..40: mol_type = other DNA
ttagtgtgtacaaggctgaactgcattccagagacaaagt

SEQ ID NO: 7129 - DNA, 40 bp, synthetic construct
  source 1..40: mol_type = other DNA
gcagctggtgatcagggagttccatgcgtttgctcatgtt

SEQ ID NO: 7130 - DNA, 40 bp, synthetic construct
  source 1..40: mol_type = other DNA
gtccataggcatcgtcctcaggtggagaaagcttcataat

SEQ ID NO: 7131 - DNA, 40 bp, synthetic construct
  source 1..40: mol_type = other DNA
agcttccttgcaatctccctagctcagcaccatgttaaat

SEQ ID NO: 7132 - DNA, 40 bp, synthetic construct
  source 1..40: mol_type = other DNA
gcccatcattcttggtcactgttgggatctccacggtagt

SEQ ID NO: 7133 - DNA, 40 bp, synthetic construct
  source 1..40: mol_type = other DNA
tcctttgcagttttggtctaaggacagagttagatgaagt

SEQ ID NO: 7134 - DNA, 40 bp, synthetic construct
  source 1..40: mol_type = other DNA
gttataacagcaggtgactggagatcttcctattggtgaa

SEQ ID NO: 7135 - DNA, 40 bp, synthetic construct
  source 1..40: mol_type = other DNA
agaaatactccttgatgtggggagcacttgccactggtgt

SEQ ID NO: 7136 - DNA, 40 bp, synthetic construct
  source 1..40: mol_type = other DNA
gtaagttcaggttcaaggacgcagaaacaggcaaatttgt

SEQ ID NO: 7137 - DNA, 40 bp, synthetic construct
  source 1..40: mol_type = other DNA
tttatgacagggagcaccgtccaatttgcttcacgtcaaa

SEQ ID NO: 7138 - DNA, 40 bp, synthetic construct
  source 1..40: mol_type = other DNA
acccactcatttgcagcagatgcacattgcattcccaaag

SEQ ID NO: 7139 - DNA, 40 bp, synthetic construct
  source 1..40: mol_type = other DNA
gatccaactcaaattccttctgtctttgccagcaatagat

SEQ ID NO: 7140 - DNA, 40 bp, synthetic construct
  source 1..40: mol_type = other DNA
atgctgcacgaatacctccctgctgactctgcatcctcat

SEQ ID NO: 7141 - DNA, 40 bp, synthetic construct
  source 1..40: mol_type = other DNA
atcgttgcggaacttgacgctccttgaagagcttgaagag

SEQ ID NO: 7142 - DNA, 40 bp, synthetic construct
  source 1..40: mol_type = other DNA
tatccagatgcccacacaggatggagagcactgtggctag

SEQ ID NO: 7143 - DNA, 40 bp, synthetic construct
  source 1..40: mol_type = other DNA
taggttgagaccgccggcatacgcgctttagaaacggctc

SEQ ID NO: 7144 - DNA, 40 bp, synthetic construct
  source 1..40: mol_type = other DNA
gagcgctagggtttacggtggctggaccacatgcatctcg

SEQ ID NO: 7145 - DNA, 40 bp, synthetic construct
  source 1..40: mol_type = other DNA
atgcgggattcttttccattcgtgtgaatggcactgccaa

SEQ ID NO: 7146 - DNA, 40 bp, synthetic construct
  source 1..40: mol_type = other DNA
actaagttctctcctcttgacccggtattgaatttggtgg

SEQ ID NO: 7147 - DNA, 40 bp, synthetic construct
  source 1..40: mol_type = other DNA
aacattccaccggaacagctcccaggccacctaggtccga

SEQ ID NO: 7148 - DNA, 40 bp, synthetic construct
  source 1..40: mol_type = other DNA
aggtggaatgacatggtcagctggccgagcagtgatctcc

SEQ ID NO: 7149 - DNA, 40 bp, synthetic construct
  source 1..40: mol_type = other DNA
cagttgctcctgttcattccatatcaccatgtttagtgcc

SEQ ID NO: 7150 - DNA, 40 bp, synthetic construct
  source 1..40: mol_type = other DNA
tttagccaaggctatctcaggaaacctaaagggactaaag

SEQ ID NO: 7151 - DNA, 40 bp, synthetic construct
  source 1..40: mol_type = other DNA
cccttaaagagtgcagggacgtaagccctgggagtacact

SEQ ID NO: 7152 - DNA, 40 bp, synthetic construct
  source 1..40: mol_type = other DNA
cctctcttcgtcctagattgcttgtccaaaacatcgtact

SEQ ID NO: 7153 - DNA, 40 bp, synthetic construct
  source 1..40: mol_type = other DNA
gaattaccaagtgagtccttgcataataagatggctccca

SEQ ID NO: 7154 - DNA, 40 bp, synthetic construct
  source 1..40: mol_type = other DNA
catctgtagattcaatgcctcaggtactttgtcttgctca

SEQ ID NO: 7155 - DNA, 40 bp, synthetic construct
  source 1..40: mol_type = other DNA
cgttggccatctgcgacgtgcacatcaaacaagccctgct

SEQ ID NO: 7156 - DNA, 40 bp, synthetic construct
  source 1..40: mol_type = other DNA
ggcactctgtcacgtgtacagtccctgccagtctcgaaaa

SEQ ID NO: 7157 - DNA, 40 bp, synthetic construct
  source 1..40: mol_type = other DNA
cttagaaggtccgggaaataaccaccagcacccaaaaggg

SEQ ID NO: 7158 - DNA, 40 bp, synthetic construct
  source 1..40: mol_type = other DNA
atgctactaaatgtcagggagctaacattgtatgtcgggc

SEQ ID NO: 7159 - DNA, 40 bp, synthetic construct
  source 1..40: mol_type = other DNA
ctgcttgtagtgagacccaggagtctcttaagcagatagg

SEQ ID NO: 7160 - DNA, 40 bp, synthetic construct
  source 1..40: mol_type = other DNA
atacaagtccaggagatcttcacaggtcagggttgtgttg

SEQ ID NO: 7161 - DNA, 40 bp, synthetic construct
  source 1..40: mol_type = other DNA
ggttctagagtgccagggattcaggtttttggagtggccg

SEQ ID NO: 7162 - DNA, 40 bp, synthetic construct
  source 1..40: mol_type = other DNA
agaccacaatcctccttaatttattgagctcttacactcc

SEQ ID NO: 7163 - DNA, 40 bp, synthetic construct
  source 1..40: mol_type = other DNA
ctctggtggcttgcaacatctcagggtcttttgggaatag

SEQ ID NO: 7164 - DNA, 40 bp, synthetic construct
  source 1..40: mol_type = other DNA
aaatagccagtgatgcccaaagctgcggcgattcatcagg

SEQ ID NO: 7165 - DNA, 40 bp, synthetic construct
  source 1..40: mol_type = other DNA
gcaaattatggacttccacatgtctgaaccttctctggtt

SEQ ID NO: 7166 - DNA, 40 bp, synthetic construct
  source 1..40: mol_type = other DNA
cttttatggtgggatcctgggcttataatcgattccagct

SEQ ID NO: 7167 - DNA, 40 bp, synthetic construct
  source 1..40: mol_type = other DNA
atattcctcgtgggtccaggatctgtcccattacacctat

SEQ ID NO: 7168 - DNA, 40 bp, synthetic construct
  source 1..40: mol_type = other DNA
cacttgacgagacccaacatctcaatggatgcagggtaag

SEQ ID NO: 7169 - DNA, 40 bp, synthetic construct
  source 1..40: mol_type = other DNA
gacaattgtggccaccgacagtgatgcagatgtccactat

SEQ ID NO: 7170 - DNA, 40 bp, synthetic construct
  source 1..40: mol_type = other DNA
atggaatactttgggatgggggacggcgatagaaaagtag

SEQ ID NO: 7171 - DNA, 40 bp, synthetic construct
  source 1..40: mol_type = other DNA
agtaagccaaaggacgtgaagtgacactgttcagagtttg

SEQ ID NO: 7172 - DNA, 40 bp, synthetic construct
  source 1..40: mol_type = other DNA
ctcgaagcttcccgattggatggctataaatggagcttga

SEQ ID NO: 7173 - DNA, 40 bp, synthetic construct
  source 1..40: mol_type = other DNA
tcaccgcaaggaaggcattcaggtgtctaggaattcgctt

SEQ ID NO: 7174 - DNA, 40 bp, synthetic construct
  source 1..40: mol_type = other DNA
agcgttatactatgactggattggatttgcagtaggctga

SEQ ID NO: 7175 - DNA, 40 bp, synthetic construct
  source 1..40: mol_type = other DNA
gaagctctgagaattactctaagccttcatgtgatgtaga

SEQ ID NO: 7176 - DNA, 40 bp, synthetic construct
  source 1..40: mol_type = other DNA
aggctatcacctgaataacctccaaccacagcgaggatat

SEQ ID NO: 7177 - DNA, 40 bp, synthetic construct
  source 1..40: mol_type = other DNA
agtccatcacttcacttcagcttactactctccaaatcgg

SEQ ID NO: 7178 - DNA, 40 bp, synthetic construct
  source 1..40: mol_type = other DNA
ttgaactccaccttcttctgctagcaccacgatgtctatt

SEQ ID NO: 7179 - DNA, 40 bp, synthetic construct
  source 1..40: mol_type = other DNA
atcaatcatctagcctctcttgctagtccggcacttggta

SEQ ID NO: 7180 - DNA, 40 bp, synthetic construct
  source 1..40: mol_type = other DNA
agtgtttcgggaaggcaaaaactccaaagaaggtctcatc

SEQ ID NO: 7181 - DNA, 40 bp, synthetic construct
  source 1..40: mol_type = other DNA
ccatgtagatgccatcacgacagcgtcacctggatgtgta

SEQ ID NO: 7182 - DNA, 40 bp, synthetic construct
  source 1..40: mol_type = other DNA
tgttgccatacttggtggcacatcacatggtcctctgtca

SEQ ID NO: 7183 - DNA, 40 bp, synthetic construct
  source 1..40: mol_type = other DNA
aacccacattgaaggtactgctctgtccaagccggtttga

SEQ ID NO: 7184 - DNA, 40 bp, synthetic construct
  source 1..40: mol_type = other DNA
gtatgactcgttgccctccttaggtgccgcaggactgctg

SEQ ID NO: 7185 - DNA, 40 bp, synthetic construct
  source 1..40: mol_type = other DNA
gccaacaatttggacccaaggcttagggtcaaaagtgaaa

SEQ ID NO: 7186 - DNA, 40 bp, synthetic construct
  source 1..40: mol_type = other DNA
ggttcttgtactcgggccatagtgatatcaaagatggtcc

SEQ ID NO: 7187 - DNA, 40 bp, synthetic construct
  source 1..40: mol_type = other DNA
atcagggaatgaaacagacaatggtcatattgctcgtaac

SEQ ID NO: 7188 - DNA, 40 bp, synthetic construct
  source 1..40: mol_type = other DNA
tactagctcactcaggcttttcctggtcctgccaaaatac

SEQ ID NO: 7189 - DNA, 40 bp, synthetic construct
  source 1..40: mol_type = other DNA
ccgagcagaaatagtagccccatgatggagttgctcaggg

SEQ ID NO: 7190 - DNA, 40 bp, synthetic construct
  source 1..40: mol_type = other DNA
gcggttgtcgccttccagccggagagtcaccctccttttc

SEQ ID NO: 7191 - DNA, 40 bp, synthetic construct
  source 1..40: mol_type = other DNA
tgcaagttcatagacagtcccacaaaggtatcagcctgtt

SEQ ID NO: 7192 - DNA, 40 bp, synthetic construct
  source 1..40: mol_type = other DNA
attatctagcattgcatgccagccaatagggagcaatttt

SEQ ID NO: 7193 - DNA, 40 bp, synthetic construct
  source 1..40: mol_type = other DNA
ggtgtatatttcttcctcgtgggctatcccactgaagaga

SEQ ID NO: 7194 - DNA, 40 bp, synthetic construct
  source 1..40: mol_type = other DNA
tcattccgggctttaaacaaaccttgtgtgaaagttacag

SEQ ID NO: 7195 - DNA, 40 bp, synthetic construct
  source 1..40: mol_type = other DNA
ctggctctgaatgaacttggagggcactgcattgatagtc

SEQ ID NO: 7196 - DNA, 40 bp, synthetic construct
  source 1..40: mol_type = other DNA
ctcacgcttttggacactctccttctcctcacttcgtgct

SEQ ID NO: 7197 - DNA, 40 bp, synthetic construct
  source 1..40: mol_type = other DNA
caagtcaactcagataccactcttcaagacagtgttctgt

SEQ ID NO: 7198 - DNA, 40 bp, synthetic construct
  source 1..40: mol_type = other DNA
tttgaacccacacagaatcatcctgaagctttgaaatgtg

SEQ ID NO: 7199 - DNA, 40 bp, synthetic construct
  source 1..40: mol_type = other DNA
atatccgattagggtttgacccagtccacagaatcaggca

SEQ ID NO: 7200 - DNA, 40 bp, synthetic construct
  source 1..40: mol_type = other DNA
gagtgcattcccattgaatgggttcatgcccagatcgtat

SEQ ID NO: 7201 - DNA, 40 bp, synthetic construct
  source 1..40: mol_type = other DNA
ccctgactttatgcctacaacagcagccaaaaaagggaac

SEQ ID NO: 7202 - DNA, 40 bp, synthetic construct
  source 1..40: mol_type = other DNA
ggttggaaaagtctttccaagcacagacgttggtgatgag

SEQ ID NO: 7203 - DNA, 40 bp, synthetic construct
  source 1..40: mol_type = other DNA
gtctttgagggctcattcaactgagaaggtaaaagtctgg

SEQ ID NO: 7204 - DNA, 40 bp, synthetic construct
  source 1..40: mol_type = other DNA
gaaaacttcttggacgctttcctcgcaggagagactgccg

SEQ ID NO: 7205 - DNA, 40 bp, synthetic construct
  source 1..40: mol_type = other DNA
gcagagatgatggacgtcagccagcagaatgccaaccacc

SEQ ID NO: 7206 - DNA, 40 bp, synthetic construct
  source 1..40: mol_type = other DNA
atttgccaatttccaggaaggtggttctgagaaaggtcga

SEQ ID NO: 7207 - DNA, 40 bp, synthetic construct
  source 1..40: mol_type = other DNA
agggaggcgtagtagaccgtgcatgatgtcgcggaagttg

SEQ ID NO: 7208 - DNA, 40 bp, synthetic construct
  source 1..40: mol_type = other DNA
gggtgcagtttatttccactgcacttggtattctgggtcc

SEQ ID NO: 7209 - DNA, 40 bp, synthetic construct
  source 1..40: mol_type = other DNA
gcacctgtagatccctgagactcctgttgtaccaaccgta

SEQ ID NO: 7210 - DNA, 40 bp, synthetic construct
  source 1..40: mol_type = other DNA
tcaaatgggatgtgtgctgaccttggccagtgaaaatcta

SEQ ID NO: 7211 - DNA, 40 bp, synthetic construct
  source 1..40: mol_type = other DNA
aagccagtgatcgtctcagtctggaacggcatcaacttgg

SEQ ID NO: 7212 - DNA, 40 bp, synthetic construct
  source 1..40: mol_type = other DNA
acatcggtcacttgcatctgcactaatgctgttgtcctga

SEQ ID NO: 7213 - DNA, 40 bp, synthetic construct
  source 1..40: mol_type = other DNA
gtggtagatctcattgagtggcaaacatgcgtgtgaacca

SEQ ID NO: 7214 - DNA, 40 bp, synthetic construct
  source 1..40: mol_type = other DNA
gacagttcgcacaggacgtcgagtgtggttgtggtggtct

SEQ ID NO: 7215 - DNA, 40 bp, synthetic construct
  source 1..40: mol_type = other DNA
gcacaaccaccttaggccaaagaaacaagaaaccctccga

SEQ ID NO: 7216 - DNA, 40 bp, synthetic construct
  source 1..40: mol_type = other DNA
caccctgttttatgggcaggagccgctgagatgcctttca

SEQ ID NO: 7217 - DNA, 40 bp, synthetic construct
  source 1..40: mol_type = other DNA
acactttattctcgtgagagtgcggctaaaatcttgcttg

SEQ ID NO: 7218 - DNA, 40 bp, synthetic construct
  source 1..40: mol_type = other DNA
agtagttgtccaaactgaaggtctctgtgtagtagctgtg

SEQ ID NO: 7219 - DNA, 40 bp, synthetic construct
  source 1..40: mol_type = other DNA
catcaggcatactgtaaagttccatgcagcaattgaagtt

SEQ ID NO: 7220 - DNA, 40 bp, synthetic construct
  source 1..40: mol_type = other DNA
ttttcaaggccaaaggaagtcacgagggtctccgcattta

SEQ ID NO: 7221 - DNA, 40 bp, synthetic construct
  source 1..40: mol_type = other DNA
accaagatgcactattgtgagacttctctcagagtatcgg

SEQ ID NO: 7222 - DNA, 40 bp, synthetic construct
  source 1..40: mol_type = other DNA
cactttcgatcttcctgcacaatggcgtaagtcagattcg

SEQ ID NO: 7223 - DNA, 40 bp, synthetic construct
  source 1..40: mol_type = other DNA
ctgaacaaaggccatgtaggcgactcttctcttgcagaaa

SEQ ID NO: 7224 - DNA, 40 bp, synthetic construct
  source 1..40: mol_type = other DNA
acagtgacttctcgcagggtgttttcgacttaggacagta

SEQ ID NO: 7225 - DNA, 40 bp, synthetic construct
  source 1..40: mol_type = other DNA
tgtagtaactttggctgttgggtgataaaagggtcgccgt

SEQ ID NO: 7226 - DNA, 40 bp, synthetic construct
  source 1..40: mol_type = other DNA
gtttgagctctaacatccatcctagtgtatataaaagccc

SEQ ID NO: 7227 - DNA, 40 bp, synthetic construct
  source 1..40: mol_type = other DNA
accgacctccgctctgtattcagggcagataggcattctg

SEQ ID NO: 7228 - DNA, 40 bp, synthetic construct
  source 1..40: mol_type = other DNA
ttcttcaagtcacaaagggattgcagaaacaaagtcaggg

SEQ ID NO: 7229 - DNA, 40 bp, synthetic construct
  source 1..40: mol_type = other DNA
ggagcaatcgaagaggcataccagctagatgttagagtac

SEQ ID NO: 7230 - DNA, 40 bp, synthetic construct
  source 1..40: mol_type = other DNA
tggaaaatctcatcaccatcccttctttgccatatccaca

SEQ ID NO: 7231 - DNA, 40 bp, synthetic construct
  source 1..40: mol_type = other DNA
cgctccacctttgaaaaaagctggatccttctggtattca

SEQ ID NO: 7232 - DNA, 40 bp, synthetic construct
  source 1..40: mol_type = other DNA
atgaattggcggcggcggtgcgagtgatccctgacaggtg

SEQ ID NO: 7233 - DNA, 40 bp, synthetic construct
  source 1..40: mol_type = other DNA
tcccgttcttgcatttgcatacagcgcctttagcaaagtg

SEQ ID NO: 7234 - DNA, 40 bp, synthetic construct
  source 1..40: mol_type = other DNA
ttcttgtagtctgctcctctgttttccatagcgtgtgcca

SEQ ID NO: 7235 - DNA, 40 bp, synthetic construct
  source 1..40: mol_type = other DNA
aggttggctgcctagttggccaacccatgggatcttgctt

SEQ ID NO: 7236 - DNA, 40 bp, synthetic construct
  source 1..40: mol_type = other DNA
tcttttggatgctctggtcattccttgatggtctccacac

SEQ ID NO: 7237 - DNA, 40 bp, synthetic construct
  source 1..40: mol_type = other DNA
agttatcaagcatgccaggaacggacgttgggtggtaccc

SEQ ID NO: 7238 - DNA, 40 bp, synthetic construct
  source 1..40: mol_type = other DNA
aagtgatggagtcgggaagggttcttgtatttccaggaga

SEQ ID NO: 7239 - DNA, 40 bp, synthetic construct
  source 1..40: mol_type = other DNA
ggtgctggactttgcacacccttttctttgttgccgttgg

SEQ ID NO: 7240 - DNA, 40 bp, synthetic construct
  source 1..40: mol_type = other DNA
cggcgccgcacatacagctgggacactgggtagcttcttt

SEQ ID NO: 7241 - DNA, 40 bp, synthetic construct
  source 1..40: mol_type = other DNA
cactgcggtaaggtcataggctgtggtacaggtccaaggt

SEQ ID NO: 7242 - DNA, 40 bp, synthetic construct
  source 1..40: mol_type = other DNA
gtaaccctaagggcaggagcgacaaggcttggcaacccag

SEQ ID NO: 7243 - DNA, 40 bp, synthetic construct
  source 1..40: mol_type = other DNA
aggacagcttggttctagcggctgctgcaactagcttaag

SEQ ID NO: 7244 - DNA, 40 bp, synthetic construct
  source 1..40: mol_type = other DNA
acttaaagttcgttctgcccttgggctgaacttttctcat

SEQ ID NO: 7245 - DNA, 40 bp, synthetic construct
  source 1..40: mol_type = other DNA
gtagtaatctgaggacctttcaaggtgaggtggatcggtt

SEQ ID NO: 7246 - DNA, 40 bp, synthetic construct
  source 1..40: mol_type = other DNA
attcgtagctggatgccgcctgctgtagtggtggtcggag

SEQ ID NO: 7247 - DNA, 40 bp, synthetic construct
  source 1..40: mol_type = other DNA
tcagttatatcctggccgccacacaaattgcatggtgaag

SEQ ID NO: 7248 - DNA, 40 bp, synthetic construct
  source 1..40: mol_type = other DNA
tctctggcgggtcatcgtcatttgaatgtggcgtgtggga

SEQ ID NO: 7249 - DNA, 40 bp, synthetic construct
  source 1..40: mol_type = other DNA
tggttgcagccatttctgtctgtaaatatggacgtctcca

SEQ ID NO: 7250 - DNA, 40 bp, synthetic construct
  source 1..40: mol_type = other DNA
tctcgagttgtagaagcatgcagacacaggagatgttggc

SEQ ID NO: 7251 - DNA, 40 bp, synthetic construct
  source 1..40: mol_type = other DNA
ggcatcctctcttcaccggcctctttcttgcaaagaaggg

SEQ ID NO: 7252 - DNA, 40 bp, synthetic construct
  source 1..40: mol_type = other DNA
ttggaaggttcaggttgttttccatctttttcagccatct

SEQ ID NO: 7253 - DNA, 40 bp, synthetic construct
  source 1..40: mol_type = other DNA
ctagactaggttgtccctcctggtctcatgcaaatgggct

SEQ ID NO: 7254 - DNA, 40 bp, synthetic construct
  source 1..40: mol_type = other DNA
gagctttctctgcaggagtgtcatacattgctgccggttg

SEQ ID NO: 7255 - DNA, 40 bp, synthetic construct
  source 1..40: mol_type = other DNA
actttacctccacgagggcctagtttcctgaaattcaggc

SEQ ID NO: 7256 - DNA, 40 bp, synthetic construct
  source 1..40: mol_type = other DNA
ccttcccatccacgtttgttaggttcattgagtaggtacc

SEQ ID NO: 7257 - DNA, 40 bp, synthetic construct
  source 1..40: mol_type = other DNA
cgggttcttaaggccgccgggggaagaaggcagaggttgc

SEQ ID NO: 7258 - DNA, 40 bp, synthetic construct
  source 1..40: mol_type = other DNA
agaggttgcctttgagggtacttgatgtaccagtcaaacg

SEQ ID NO: 7259 - DNA, 40 bp, synthetic construct
  source 1..40: mol_type = other DNA
actctggtcatgttgatgaacatcattcatgtctgaatcc

SEQ ID NO: 7260 - DNA, 40 bp, synthetic construct
  source 1..40: mol_type = other DNA
cgccaggaagtcagatgctgacgggattcttctgaatgtg

SEQ ID NO: 7261 - DNA, 40 bp, synthetic construct
  source 1..40: mol_type = other DNA
aaagcgcctgtactcccggagacttgagcttctccttctc

SEQ ID NO: 7262 - DNA, 40 bp, synthetic construct
  source 1..40: mol_type = other DNA
tccggaaatcagctgcttccccctcgggtgcatccaggtt

SEQ ID NO: 7263 - DNA, 40 bp, synthetic construct
  source 1..40: mol_type = other DNA
atctggttctcaatggtgaggtcagacaaatggtacacaa

SEQ ID NO: 7264 - DNA, 40 bp, synthetic construct
  source 1..40: mol_type = other DNA
gtcatggccgcatctgactttgagcatctttacagcgaca

SEQ ID NO: 7265 - DNA, 40 bp, synthetic construct
  source 1..40: mol_type = other DNA
agtacacagaactagacacagttttctcttttccacgttg

SEQ ID NO: 7266 - DNA, 40 bp, synthetic construct
  source 1..40: mol_type = other DNA
aggagaataatcccagcacaacccagtaacaaccaagaca

SEQ ID NO: 7267 - DNA, 40 bp, synthetic construct
  source 1..40: mol_type = other DNA
agagatcagtaatgggaagcgtatgtgcagctacaagtac

SEQ ID NO: 7268 - DNA, 40 bp, synthetic construct
  source 1..40: mol_type = other DNA
gtaagagagtccaatccagtcaggcggtgtgctcctcact

SEQ ID NO: 7269 - DNA, 40 bp, synthetic construct
  source 1..40: mol_type = other DNA
atccaatccagcctgctgagcttcagtaaagaagtgccaa

SEQ ID NO: 7270 - DNA, 40 bp, synthetic construct
  source 1..40: mol_type = other DNA
ttttagatctccagtgtcctcttcttgtgccattattcac

SEQ ID NO: 7271 - DNA, 40 bp, synthetic construct
  source 1..40: mol_type = other DNA
aactataggacatgatgccttacattcatcagggatgaca

SEQ ID NO: 7272 - DNA, 40 bp, synthetic construct
  source 1..40: mol_type = other DNA
tctacctaacagtcttgaacgtactcaccactacacaccc

SEQ ID NO: 7273 - DNA, 40 bp, synthetic construct
  source 1..40: mol_type = other DNA
agccatctctgtaggtgaggatacatgatggagacgttga

SEQ ID NO: 7274 - DNA, 40 bp, synthetic construct
  source 1..40: mol_type = other DNA
gcgtacactgtcaagggagtccaccctggaacctgctcca

SEQ ID NO: 7275 - DNA, 40 bp, synthetic construct
  source 1..40: mol_type = other DNA
gaggtgttgtgtcttcaagatagcagatatggtcattgct

SEQ ID NO: 7276 - DNA, 40 bp, synthetic construct
  source 1..40: mol_type = other DNA
agatttttatctccctcaggctcatgtctgaagcgcagta

SEQ ID NO: 7277 - DNA, 40 bp, synthetic construct
  source 1..40: mol_type = other DNA
gggatccagaatgctggctacacgcaaatgcattactgta

SEQ ID NO: 7278 - DNA, 40 bp, synthetic construct
  source 1..40: mol_type = other DNA
accggactgttatttatccatgttccagttgacaaaggag

SEQ ID NO: 7279 - DNA, 40 bp, synthetic construct
  source 1..40: mol_type = other DNA
agctgctacaatggctacatagaagaagcgtgacaacaca

SEQ ID NO: 7280 - DNA, 40 bp, synthetic construct
  source 1..40: mol_type = other DNA
aacagtattgggtagatggggaacagagattgtatgctgt

SEQ ID NO: 7281 - DNA, 40 bp, synthetic construct
  source 1..40: mol_type = other DNA
atgagccgccttggattttcgccgaggtcctgaacacaaa

SEQ ID NO: 7282 - DNA, 40 bp, synthetic construct
  source 1..40: mol_type = other DNA
tactcagcattccagtccagcagccaccacgtagacctca

SEQ ID NO: 7283 - DNA, 40 bp, synthetic construct
  source 1..40: mol_type = other DNA
cagtagaaggtcaccttctcttgttgcagtgtctagacgg

SEQ ID NO: 7284 - DNA, 40 bp, synthetic construct
  source 1..40: mol_type = other DNA
gtgtgttcagccttctcctgggtcattcttcaaagagtct

SEQ ID NO: 7285 - DNA, 40 bp, synthetic construct
  source 1..40: mol_type = other DNA
tcaaaactcatcttgccgctaggcctttggaatacaacgc

SEQ ID NO: 7286 - DNA, 40 bp, synthetic construct
  source 1..40: mol_type = other DNA
attccagaacacacagctgagtaagttccctcacgtgagt

SEQ ID NO: 7287 - DNA, 40 bp, synthetic construct
  source 1..40: mol_type = other DNA
tgtacagttccttagggactattgctgccatgctctatta

SEQ ID NO: 7288 - DNA, 40 bp, synthetic construct
  source 1..40: mol_type = other DNA
tttggaactggccggctggccacgacaccaaccaccaggg

SEQ ID NO: 7289 - DNA, 40 bp, synthetic construct
  source 1..40: mol_type = other DNA
aaccaaagaacatgccggtgacccatgggactgggtgctg

SEQ ID NO: 7290 - DNA, 40 bp, synthetic construct
  source 1..40: mol_type = other DNA
gtacttcaccatcactgactgagttccgcacagtcgcgtc

SEQ ID NO: 7291 - DNA, 40 bp, synthetic construct
  source 1..40: mol_type = other DNA
cacatctgtcatagataagcgtggatccgacagttaagat

SEQ ID NO: 7292 - DNA, 40 bp, synthetic construct
  source 1..40: mol_type = other DNA
ttgtagagctgagtcttctcaaggctcttcatgaggctta

SEQ ID NO: 7293 - DNA, 40 bp, synthetic construct
  source 1..40: mol_type = other DNA
gtcattggtgtagatttcacttggcgttcttaggaactgt

SEQ ID NO: 7294 - DNA, 40 bp, synthetic construct
  source 1..40: mol_type = other DNA
cgcatccagttgcttttctcagtgtgctggattcacatag

SEQ ID NO: 7295 - DNA, 40 bp, synthetic construct
  source 1..40: mol_type = other DNA
gacagggtgaatcgggattacggagggcttaggcagtttg

SEQ ID NO: 7296 - DNA, 40 bp, synthetic construct
  source 1..40: mol_type = other DNA
ggaggtgtgatggccgccaaccgaacagcaggtcgttaat

SEQ ID NO: 7297 - DNA, 40 bp, synthetic construct
  source 1..40: mol_type = other DNA
atcgcacttatactggtcaatagaatcctgtccgggtaca

SEQ ID NO: 7298 - DNA, 40 bp, synthetic construct
  source 1..40: mol_type = other DNA
gggtggaacattcctaccactgtgatactttctgtactgc

SEQ ID NO: 7299 - DNA, 40 bp, synthetic construct
  source 1..40: mol_type = other DNA
agtcatcgtcttgcactctgtccagctgcgacattttgca

SEQ ID NO: 7300 - DNA, 40 bp, synthetic construct
  source 1..40: mol_type = other DNA
ctgagcagatgaaggtacatcccaattaactcagttcctt

SEQ ID NO: 7301 - DNA, 40 bp, synthetic construct
  source 1..40: mol_type = other DNA
caatttccgccttgttttgtcagagtcttctccagatact

SEQ ID NO: 7302 - DNA, 40 bp, synthetic construct
  source 1..40: mol_type = other DNA
atgggcacgaagcctgtggtgtgacacttcacccacatac

SEQ ID NO: 7303 - DNA, 40 bp, synthetic construct
  source 1..40: mol_type = other DNA
ttctgatcactctttgccactgagtaacagctgttcttgt

SEQ ID NO: 7304 - DNA, 40 bp, synthetic construct
  source 1..40: mol_type = other DNA
tcatagacatctggattgggcttcagacagctgtaaatga

SEQ ID NO: 7305 - DNA, 40 bp, synthetic construct
  source 1..40: mol_type = other DNA
ggagatcaccacaactggcatttggcatctgacagatgtt

SEQ ID NO: 7306 - DNA, 40 bp, synthetic construct
  source 1..40: mol_type = other DNA
accctgaataattcacaccatttagcccatgtgatctgac

SEQ ID NO: 7307 - DNA, 40 bp, synthetic construct
  source 1..40: mol_type = other DNA
acttcagagggttttcaggagggaatgtcaggatataggt

SEQ ID NO: 7308 - DNA, 40 bp, synthetic construct
  source 1..40: mol_type = other DNA
cagagtggaatctcacttccgcctttattgtagggttcta

SEQ ID NO: 7309 - DNA, 40 bp, synthetic construct
  source 1..40: mol_type = other DNA
cagactttactgcagcagctagagatgaaactatgggccc

SEQ ID NO: 7310 - DNA, 40 bp, synthetic construct
  source 1..40: mol_type = other DNA
agattcccgcacctgcacttacctggctggactttgccag

SEQ ID NO: 7311 - DNA, 40 bp, synthetic construct
  source 1..40: mol_type = other DNA
ccgctctggtaccgccagtgttccacactgcacccacttg

SEQ ID NO: 7312 - DNA, 40 bp, synthetic construct
  source 1..40: mol_type = other DNA
tgtagttagggcagaggatgcgcagcaccaggtaaacgac

SEQ ID NO: 7313 - DNA, 40 bp, synthetic construct
  source 1..40: mol_type = other DNA
cagggtagagctgccacatgtgaggatcggtatcgtccat

SEQ ID NO: 7314 - DNA, 40 bp, synthetic construct
  source 1..40: mol_type = other DNA
actagtgctgtgagggacaggtgggtgtgcaacatgaaat

SEQ ID NO: 7315 - DNA, 40 bp, synthetic construct
  source 1..40: mol_type = other DNA
gagcctcagcagacgcagcttgctgctccacttttaactt

SEQ ID NO: 7316 - DNA, 40 bp, synthetic construct
  source 1..40: mol_type = other DNA
ggaatagtgcagacaggcaggtgccttgatgccgggcaaa

SEQ ID NO: 7317 - DNA, 40 bp, synthetic construct
  source 1..40: mol_type = other DNA
caatggaatctggaacctgggtcgcggccatggctccaag

SEQ ID NO: 7318 - DNA, 40 bp, synthetic construct
  source 1..40: mol_type = other DNA
accagtaaatccaacctccccccatgaaagaaaatcagtc

SEQ ID NO: 7319 - DNA, 40 bp, synthetic construct
  source 1..40: mol_type = other DNA
acggtacatccacgtagtttagtaagcaagtcctcaaatg

SEQ ID NO: 7320 - DNA, 40 bp, synthetic construct
  source 1..40: mol_type = other DNA
tagagatctcacagaaccaatcagtggccgccttgattca

SEQ ID NO: 7321 - DNA, 40 bp, synthetic construct
  source 1..40: mol_type = other DNA
gagactggacaagccattgaccagccattttcaagacttc

SEQ ID NO: 7322 - DNA, 40 bp, synthetic construct
  source 1..40: mol_type = other DNA
ccatcttcaattgtctggatggcttaggctctgatatgcc

SEQ ID NO: 7323 - DNA, 40 bp, synthetic construct
  source 1..40: mol_type = other DNA
gttcctttcactgaattggtaggtccagagaatcgcattc

SEQ ID NO: 7324 - DNA, 40 bp, synthetic construct
  source 1..40: mol_type = other DNA
cattaagctcccaacagtaagaaaccaaggaagtttctac

SEQ ID NO: 7325 - DNA, 40 bp, synthetic construct
  source 1..40: mol_type = other DNA
cgttgtagaagcccggcccgcggcttggagctgaccacgt

SEQ ID NO: 7326 - DNA, 40 bp, synthetic construct
  source 1..40: mol_type = other DNA
gggactgcaaatctgattccgagaaactatttggaggaca

SEQ ID NO: 7327 - DNA, 40 bp, synthetic construct
  source 1..40: mol_type = other DNA
caaagctgattccaagagaatggcacaggtatgatactag

SEQ ID NO: 7328 - DNA, 40 bp, synthetic construct
  source 1..40: mol_type = other DNA
acggcacgcttatttctgctctgtttcttctggaccctga

SEQ ID NO: 7329 - DNA, 40 bp, synthetic construct
  source 1..40: mol_type = other DNA
agtaaattatggatgccacggatgtgggcacttgctccat

SEQ ID NO: 7330 - DNA, 40 bp, synthetic construct
  source 1..40: mol_type = other DNA
ctcggtgaagggagtccggcaggctggacgttattccgac

SEQ ID NO: 7331 - DNA, 40 bp, synthetic construct
  source 1..40: mol_type = other DNA
gtgagaggaagagaacctgcgtggagccgtgggtcagtat

SEQ ID NO: 7332 - DNA, 40 bp, synthetic construct
  source 1..40: mol_type = other DNA
cctaaggtccacttgtgtcaaacatctggagagaggaagg

SEQ ID NO: 7333 - DNA, 40 bp, synthetic construct
  source 1..40: mol_type = other DNA
gtataggcgccatctatagatcaactgggcctttcggatg

SEQ ID NO: 7334 - DNA, 40 bp, synthetic construct
  source 1..40: mol_type = other DNA
ttcgttcccaaaactaacaggctgtgcacaggtaagagtg

SEQ ID NO: 7335 - DNA, 40 bp, synthetic construct
  source 1..40: mol_type = other DNA
ttcagtgcgacgccgcgagcccagaagttggacgaaaagt

SEQ ID NO: 7336 - DNA, 40 bp, synthetic construct
  source 1..40: mol_type = other DNA
tcttcgccgggacatctgccttccaacaatgtgtctcttc

SEQ ID NO: 7337 - DNA, 40 bp, synthetic construct
  source 1..40: mol_type = other DNA
gtcagctatgaaattctgtgtggctgctcgtctcaaagta

SEQ ID NO: 7338 - DNA, 40 bp, synthetic construct
  source 1..40: mol_type = other DNA
gacaggacagtcacgcagagcagctactagcatgaggaga

SEQ ID NO: 7339 - DNA, 40 bp, synthetic construct
  source 1..40: mol_type = other DNA
ccatgtagctcaggtagacaggacacattgtactccaccg

SEQ ID NO: 7340 - DNA, 40 bp, synthetic construct
  source 1..40: mol_type = other DNA
gatgcattctgagccgagaagtgcttggagatctcgaagg

SEQ ID NO: 7341 - DNA, 40 bp, synthetic construct
  source 1..40: mol_type = other DNA
tttcagaatggtgaggttagccattgtgacttatgttggt

SEQ ID NO: 7342 - DNA, 40 bp, synthetic construct
  source 1..40: mol_type = other DNA
cactggagctggaaatagctgatgtcacagatgcattcag

SEQ ID NO: 7343 - DNA, 40 bp, synthetic construct
  source 1..40: mol_type = other DNA
acagtctctgaagacacattcttgagtgatggtgatgttc

SEQ ID NO: 7344 - DNA, 40 bp, synthetic construct
  source 1..40: mol_type = other DNA
aaacagagacagctaaagcttgttgcgcttaaagcttaca

SEQ ID NO: 7345 - DNA, 40 bp, synthetic construct
  source 1..40: mol_type = other DNA
ctcactggtttgccaatatataggtcaccacggttttcga

SEQ ID NO: 7346 - DNA, 40 bp, synthetic construct
  source 1..40: mol_type = other DNA
ctgacttccttctcctgagtcgtcgctgcctaccatcgct

SEQ ID NO: 7347 - DNA, 40 bp, synthetic construct
  source 1..40: mol_type = other DNA
tcccacttgagggcgtccagtggtccttgaacagcgctct

SEQ ID NO: 7348 - DNA, 40 bp, synthetic construct
  source 1..40: mol_type = other DNA
attatgcacctccacgccgttcccgcggctttgtcttggc

SEQ ID NO: 7349 - DNA, 40 bp, synthetic construct
  source 1..40: mol_type = other DNA
accctctttgtcgtcttgccgctttcgcaagaacacgggc

SEQ ID NO: 7350 - DNA, 40 bp, synthetic construct
  source 1..40: mol_type = other DNA
caagaagcctggctctcataggctggcattttgagacata

SEQ ID NO: 7351 - DNA, 40 bp, synthetic construct
  source 1..40: mol_type = other DNA
cttgtggataaaagccttctagagagggaagatcttgatt

SEQ ID NO: 7352 - DNA, 40 bp, synthetic construct
  source 1..40: mol_type = other DNA
gggcctctttatagcgacagcagctgccgacattgttcaa

SEQ ID NO: 7353 - DNA, 40 bp, synthetic construct
  source 1..40: mol_type = other DNA
tggcatttaaaggaagccagcaggcttcgcaagagcacat

SEQ ID NO: 7354 - DNA, 40 bp, synthetic construct
  source 1..40: mol_type = other DNA
atgaataggaagcgcagggctgtaataacagttgccgtcc

SEQ ID NO: 7355 - DNA, 40 bp, synthetic construct
  source 1..40: mol_type = other DNA
acgaaggcatcgtagggcagtctgcgttttgtcgaagacc

SEQ ID NO: 7356 - DNA, 40 bp, synthetic construct
  source 1..40: mol_type = other DNA
gtcatagagcttaagcgtctatgtcacaactgggaaagaa

SEQ ID NO: 7357 - DNA, 40 bp, synthetic construct
  source 1..40: mol_type = other DNA
ggtatcttctgaacttctcctttcccatacaggtggtaaa

SEQ ID NO: 7358 - DNA, 40 bp, synthetic construct
  source 1..40: mol_type = other DNA
caaatcagaatggcagtttggagtcagaaagataaggcag

SEQ ID NO: 7359 - DNA, 40 bp, synthetic construct
  source 1..40: mol_type = other DNA
ccttggaagatgggaaaggtgcagaaagattccttagtac

SEQ ID NO: 7360 - DNA, 40 bp, synthetic construct
  source 1..40: mol_type = other DNA
tacattatggaggctttctctgtcacagttgttacttggg

SEQ ID NO: 7361 - DNA, 40 bp, synthetic construct
  source 1..40: mol_type = other DNA
ttataagggcttgactccaggacacatagatgcttttgac

SEQ ID NO: 7362 - DNA, 40 bp, synthetic construct
  source 1..40: mol_type = other DNA
tgtaatagacctccagaacaacatctacacctcaagcttg

SEQ ID NO: 7363 - DNA, 40 bp, synthetic construct
  source 1..40: mol_type = other DNA
gtgaagaagcttgagtttgcgtgtatatagggtgctgtga

SEQ ID NO: 7364 - DNA, 40 bp, synthetic construct
  source 1..40: mol_type = other DNA
tggttggtgctgatgcaggaattgtaggtggatagtccct

SEQ ID NO: 7365 - DNA, 40 bp, synthetic construct
  source 1..40: mol_type = other DNA
ttggattttgagcctgagaaagttccaagtcactcctgta

SEQ ID NO: 7366 - DNA, 40 bp, synthetic construct
  source 1..40: mol_type = other DNA
gcgggaagacgatggctgcctcagaccaggatgaatcccg

SEQ ID NO: 7367 - DNA, 40 bp, synthetic construct
  source 1..40: mol_type = other DNA
tggccacgtctaccctgcttcaggcctgaggtgaccgact

SEQ ID NO: 7368 - DNA, 40 bp, synthetic construct
  source 1..40: mol_type = other DNA
accaggatgaccaatccattgtttcttctggtaacccatg

SEQ ID NO: 7369 - DNA, 40 bp, synthetic construct
  source 1..40: mol_type = other DNA
cactgacgttggcaaagatggatatatctgtcatctgcct

SEQ ID NO: 7370 - DNA, 40 bp, synthetic construct
  source 1..40: mol_type = other DNA
ctcctaaactgaggtcagacaagatgacgtaaatgaccca

SEQ ID NO: 7371 - DNA, 40 bp, synthetic construct
  source 1..40: mol_type = other DNA
ccttcagcctcgccagggtgcttgcaggtattgtccacgg

SEQ ID NO: 7372 - DNA, 40 bp, synthetic construct
  source 1..40: mol_type = other DNA
atgcctgcataggcccagaaggccaaacacccattcatgg

SEQ ID NO: 7373 - DNA, 40 bp, synthetic construct
  source 1..40: mol_type = other DNA
gcctaaccagccaggcgtggctgtgatccacagaaaagta

SEQ ID NO: 7374 - DNA, 40 bp, synthetic construct
  source 1..40: mol_type = other DNA
ttgcggacgccgtcttcctcgcccttcgcacttcttacac

SEQ ID NO: 7375 - DNA, 40 bp, synthetic construct
  source 1..40: mol_type = other DNA
gttatgttcaggctgacgacgggagcgtaatcccaaggat

SEQ ID NO: 7376 - DNA, 40 bp, synthetic construct
  source 1..40: mol_type = other DNA
tatggtttgcctcttgtactacctattggtaggccaatct

SEQ ID NO: 7377 - DNA, 40 bp, synthetic construct
  source 1..40: mol_type = other DNA
agcgcgattgaagtgctccgcctcgtcaatgaatactttg

SEQ ID NO: 7378 - DNA, 40 bp, synthetic construct
  source 1..40: mol_type = other DNA
acgcgttgtaagaataccctcagtccttccacacgaccat

SEQ ID NO: 7379 - DNA, 40 bp, synthetic construct
  source 1..40: mol_type = other DNA
cgcagtttaaggtacgtcgctacacgatccaagttaccag

SEQ ID NO: 7380 - DNA, 40 bp, synthetic construct
  source 1..40: mol_type = other DNA
tgttgcagacaattgtcaggctcattgcgattgtggccct

SEQ ID NO: 7381 - DNA, 40 bp, synthetic construct
  source 1..40: mol_type = other DNA
tcgcttaaacgttggttcagttggcgtgatgggatgaacg

SEQ ID NO: 7382 - DNA, 40 bp, synthetic construct
  source 1..40: mol_type = other DNA
agcacccgcggaccggaaaaacaactcgggatacaaattg

SEQ ID NO: 7383 - DNA, 40 bp, synthetic construct
  source 1..40: mol_type = other DNA
cctcttcattgtcgaaagatttagcggcggattacccggc

SEQ ID NO: 7384 - DNA, 40 bp, synthetic construct
  source 1..40: mol_type = other DNA
cgtagcgtgatggtcttatacagccaagatgatagatacc

SEQ ID NO: 7385 - DNA, 40 bp, synthetic construct
  source 1..40: mol_type = other DNA
cactcggtatcgtgcagacaagcctaggttacggtggaac

SEQ ID NO: 7386 - DNA, 40 bp, synthetic construct
  source 1..40: mol_type = other DNA
gtccatagcagatataggaatgtgttcccatgaagaagag

SEQ ID NO: 7387 - DNA, 40 bp, synthetic construct
  source 1..40: mol_type = other DNA
tgacgcagtaattggagatcgaattgcctaatccaacaca

SEQ ID NO: 7388 - DNA, 40 bp, synthetic construct
  source 1..40: mol_type = other DNA
aaagccttgaagatcagcctaattcacaaacttcagcagg

SEQ ID NO: 7389 - DNA, 40 bp, synthetic construct
  source 1..40: mol_type = other DNA
tctgtagatgatgacgccgaaaggcggcggccatggagat

SEQ ID NO: 7390 - DNA, 40 bp, synthetic construct
  source 1..40: mol_type = other DNA
aacaggactgcactctccagcttggaaatgaacccatagg

SEQ ID NO: 7391 - DNA, 40 bp, synthetic construct
  source 1..40: mol_type = other DNA
cgcgtatctgttccaaaagaccaacaggtttcacagtaag

SEQ ID NO: 7392 - DNA, 40 bp, synthetic construct
  source 1..40: mol_type = other DNA
cggcgaagtgccagattgcacgaaacaaaaagctggttgt

SEQ ID NO: 7393 - DNA, 40 bp, synthetic construct
  source 1..40: mol_type = other DNA
ttctgcccttcggtcagcaccaagcttctcgaagtagcgc

SEQ ID NO: 7394 - DNA, 40 bp, synthetic construct
  source 1..40: mol_type = other DNA
cggtgcaaggacccacagggtcacctgtgttgaaggtggc

SEQ ID NO: 7395 - DNA, 40 bp, synthetic construct
  source 1..40: mol_type = other DNA
atgtccgggtctcccagggcgagtggtgagaggcacgtac

SEQ ID NO: 7396 - DNA, 40 bp, synthetic construct
  source 1..40: mol_type = other DNA
aactagaactaccagggcccccttgctttggaagctgatt

SEQ ID NO: 7397 - DNA, 40 bp, synthetic construct
  source 1..40: mol_type = other DNA
caaatcaccaaggtagatctgacacaaagcaaccagggtc

SEQ ID NO: 7398 - DNA, 40 bp, synthetic construct
  source 1..40: mol_type = other DNA
acaattggtctagtcttcaccagcagttgtgtcaagcatg

SEQ ID NO: 7399 - DNA, 40 bp, synthetic construct
  source 1..40: mol_type = other DNA
ccacatcgtgcttcttgcccgtccaccgtgtgctcagaac

SEQ ID NO: 7400 - DNA, 40 bp, synthetic construct
  source 1..40: mol_type = other DNA
cagagtggccattgttggtggtcattgaagtctacctgga

SEQ ID NO: 7401 - DNA, 40 bp, synthetic construct
  source 1..40: mol_type = other DNA
ttttcagcacgtcatcaatcaggtgccttgtcggtcatat

SEQ ID NO: 7402 - DNA, 40 bp, synthetic construct
  source 1..40: mol_type = other DNA
atccaagtgcacagaaccataaaactggacagcatttcac

SEQ ID NO: 7403 - DNA, 40 bp, synthetic construct
  source 1..40: mol_type = other DNA
tctgcgataccctcagctgctcgggactcgccatccgttc

SEQ ID NO: 7404 - DNA, 40 bp, synthetic construct
  source 1..40: mol_type = other DNA
cagactggcagtaacacgtggtatttacccaacgctgacg

SEQ ID NO: 7405 - DNA, 40 bp, synthetic construct
  source 1..40: mol_type = other DNA
agcacatggtttttagctcacaggagcaaactcttggtac

SEQ ID NO: 7406 - DNA, 40 bp, synthetic construct
  source 1..40: mol_type = other DNA
atactggttcagagacctgttctgggtagtacaatgcagg

SEQ ID NO: 7407 - DNA, 40 bp, synthetic construct
  source 1..40: mol_type = other DNA
ttctcaccaggagaaaaacaccgtagacatggtcttcgaa

SEQ ID NO: 7408 - DNA, 40 bp, synthetic construct
  source 1..40: mol_type = other DNA
ctgctcaggaacatgatggttcagtgtggtacttcatgag

SEQ ID NO: 7409 - DNA, 40 bp, synthetic construct
  source 1..40: mol_type = other DNA
gctcttaagatgtagagggatagcgatgtctattacctgg

SEQ ID NO: 7410 - DNA, 40 bp, synthetic construct
  source 1..40: mol_type = other DNA
ttggattccagaaacggaggggaaatgtgagcaattctgc

SEQ ID NO: 7411 - DNA, 40 bp, synthetic construct
  source 1..40: mol_type = other DNA
ggtggtcacttggtctttattcacacacgctgacctctaa

SEQ ID NO: 7412 - DNA, 40 bp, synthetic construct
  source 1..40: mol_type = other DNA
tttggcttccgcagtgtaaaagctttctatcttagctgcc

SEQ ID NO: 7413 - DNA, 40 bp, synthetic construct
  source 1..40: mol_type = other DNA
aacaacccaaacagcagcaagcttggatgttacacagacc

SEQ ID NO: 7414 - DNA, 40 bp, synthetic construct
  source 1..40: mol_type = other DNA
ggtcgctttggttcttactggtttacgttcagcatgatgg

SEQ ID NO: 7415 - DNA, 40 bp, synthetic construct
  source 1..40: mol_type = other DNA
ggtgcaaacatggaatagaagggcaaacagaaaatgcaca

SEQ ID NO: 7416 - DNA, 40 bp, synthetic construct
  source 1..40: mol_type = other DNA
tgcgtcatttcttgtgacatattccacatacataggctct

SEQ ID NO: 7417 - DNA, 40 bp, synthetic construct
  source 1..40: mol_type = other DNA
gaccacatagggagaaaatgtagtttcccaagtctggagc

SEQ ID NO: 7418 - DNA, 40 bp, synthetic construct
  source 1..40: mol_type = other DNA
aactcgcccaaggtactcaagaggaaaatggtcttctaga

SEQ ID NO: 7419 - DNA, 40 bp, synthetic construct
  source 1..40: mol_type = other DNA
cggatctagatcctcctgatcccacatctgtagtactatc

SEQ ID NO: 7420 - DNA, 40 bp, synthetic construct
  source 1..40: mol_type = other DNA
gctgtgtttcttctgctgatgagagttcatcttcaaaacc

SEQ ID NO: 7421 - DNA, 40 bp, synthetic construct
  source 1..40: mol_type = other DNA
ctgggtaggtcagaggttttcatttttgtggtccgcttga

SEQ ID NO: 7422 - DNA, 40 bp, synthetic construct
  source 1..40: mol_type = other DNA
tacctcggcgatttcctggtggaggcaacacctattcggg

SEQ ID NO: 7423 - DNA, 40 bp, synthetic construct
  source 1..40: mol_type = other DNA
acagctgcagttctcctatcaattcagccctaggctattg

SEQ ID NO: 7424 - DNA, 40 bp, synthetic construct
  source 1..40: mol_type = other DNA
gcataaactaccagagggctaggctccttggcgaatattt

SEQ ID NO: 7425 - DNA, 40 bp, synthetic construct
  source 1..40: mol_type = other DNA
gaatgtagctctccaatcaccttcggatccatcgagttgg

SEQ ID NO: 7426 - DNA, 40 bp, synthetic construct
  source 1..40: mol_type = other DNA
attcttgaaagaatcagcgctacctggagtagactccatc

SEQ ID NO: 7427 - DNA, 40 bp, synthetic construct
  source 1..40: mol_type = other DNA
gccgatccatcccaggaaggagggcagtgctgacgatggc

SEQ ID NO: 7428 - DNA, 40 bp, synthetic construct
  source 1..40: mol_type = other DNA
ggaaatagactggtagagaggtgtgtaggttttgttcagt

SEQ ID NO: 7429 - DNA, 40 bp, synthetic construct
  source 1..40: mol_type = other DNA
tgccacgatggtgatcttgggcgagaaggaacagcacgcc

SEQ ID NO: 7430 - DNA, 40 bp, synthetic construct
  source 1..40: mol_type = other DNA
catgaactagatcctggagaggccagtcaccaacgacaaa

SEQ ID NO: 7431 - DNA, 40 bp, synthetic construct
  source 1..40: mol_type = other DNA
tgtgttacagacgggaagttacaatctagcatggtccacc

SEQ ID NO: 7432 - DNA, 40 bp, synthetic construct
  source 1..40: mol_type = other DNA
cgagtcagaagtgtgggaaggtgacaccggaaggaacgtc

SEQ ID NO: 7433 - DNA, 40 bp, synthetic construct
  source 1..40: mol_type = other DNA
taagactgagattggtaccatgaacgaaaagcctgagctt

SEQ ID NO: 7434 - DNA, 40 bp, synthetic construct
  source 1..40: mol_type = other DNA
tagccacatcccttcttcaaggtgcctgaaagttatatcg

SEQ ID NO: 7435 - DNA, 40 bp, synthetic construct
  source 1..40: mol_type = other DNA
ttggcagatggtaactcacagaagagggtgtcggatgaac

SEQ ID NO: 7436 - DNA, 40 bp, synthetic construct
  source 1..40: mol_type = other DNA
cgagtctttctccaaaatcgtagatccagtatgggtggag

SEQ ID NO: 7437 - DNA, 40 bp, synthetic construct
  source 1..40: mol_type = other DNA
gccgtgcagtgaggcaagttgggccatatgtgtacttggt

SEQ ID NO: 7438 - DNA, 40 bp, synthetic construct
  source 1..40: mol_type = other DNA
attctcctcaaacggttgagcgagaggcatcgatgaactc

SEQ ID NO: 7439 - DNA, 40 bp, synthetic construct
  source 1..40: mol_type = other DNA
gtcgtcccatttggccacttacaatgatatcattgccgct

SEQ ID NO: 7440 - DNA, 40 bp, synthetic construct
  source 1..40: mol_type = other DNA
actggtagtccatagtgaagggtgtaagagcttaaccaca

SEQ ID NO: 7441 - DNA, 40 bp, synthetic construct
  source 1..40: mol_type = other DNA
cagcaccagggtggtggccacagcccatcaactggatagt

SEQ ID NO: 7442 - DNA, 40 bp, synthetic construct
  source 1..40: mol_type = other DNA
tgtgcgaacccgtgccaacccgtcctgccgcttgaatggg

SEQ ID NO: 7443 - DNA, 40 bp, synthetic construct
  source 1..40: mol_type = other DNA
gcttaccaactggctaggcaagtagttctttgcccacctg

SEQ ID NO: 7444 - DNA, 40 bp, synthetic construct
  source 1..40: mol_type = other DNA
gccggttcggcaatagcagggactcacgggtagcacaacg

SEQ ID NO: 7445 - DNA, 40 bp, synthetic construct
  source 1..40: mol_type = other DNA
gtacttcttcctgatggagtggcatgttcttgtcgcaggg

SEQ ID NO: 7446 - DNA, 40 bp, synthetic construct
  source 1..40: mol_type = other DNA
caagcagtcggagcagttctacgatgagctctgctcgcat

SEQ ID NO: 7447 - DNA, 40 bp, synthetic construct
  source 1..40: mol_type = other DNA
cttgcgtcgtacttgttcttatcgtgagaagtcaatggcg

SEQ ID NO: 7448 - DNA, 40 bp, synthetic construct
  source 1..40: mol_type = other DNA
gatcctagactggagtgtgccacctacgctcttgctcgga

SEQ ID NO: 7449 - DNA, 40 bp, synthetic construct
  source 1..40: mol_type = other DNA
gcttgtagttttcacagacacacaaagcagtttacggcca

SEQ ID NO: 7450 - DNA, 40 bp, synthetic construct
  source 1..40: mol_type = other DNA
gagaattcaggtgctttttccagcttttagaccctgcatt

SEQ ID NO: 7451 - DNA, 40 bp, synthetic construct
  source 1..40: mol_type = other DNA
ccgataggctatggcctctgtcactagcagaagtgaactt

SEQ ID NO: 7452 - DNA, 40 bp, synthetic construct
  source 1..40: mol_type = other DNA
gtgatcaaactgacccatgatcgagccggattatattggg

SEQ ID NO: 7453 - DNA, 40 bp, synthetic construct
  source 1..40: mol_type = other DNA
cattctgcacgatttccgacggtgaacttgaagtgcttcc

SEQ ID NO: 7454 - DNA, 40 bp, synthetic construct
  source 1..40: mol_type = other DNA
ggcgttggccaggacttacttgagatggaacctatcaaag

SEQ ID NO: 7455 - DNA, 40 bp, synthetic construct
  source 1..40: mol_type = other DNA
ttccaatgtgcaatgacacggcccaaggaaattaatgaga

SEQ ID NO: 7456 - DNA, 40 bp, synthetic construct
  source 1..40: mol_type = other DNA
ctgtacatcttgctggtgaaacaatgtaaacacaggcgtt

SEQ ID NO: 7457 - DNA, 40 bp, synthetic construct
  source 1..40: mol_type = other DNA
cgagcggagtgtaaggccaagagagtgacacatggtgagc

SEQ ID NO: 7458 - DNA, 40 bp, synthetic construct
  source 1..40: mol_type = other DNA
gggtagagaaccctgcggctcggcgatactcaccactcga

SEQ ID NO: 7459 - DNA, 40 bp, synthetic construct
  source 1..40: mol_type = other DNA
ggcattcttttaggtaagacctcctctccattttcaggtc

SEQ ID NO: 7460 - DNA, 40 bp, synthetic construct
  source 1..40: mol_type = other DNA
tcaaaagaggcagatgcacaaagacatgtgtcttccaacg

SEQ ID NO: 7461 - DNA, 40 bp, synthetic construct
  source 1..40: mol_type = other DNA
cctcagttatctcacggctgatagaatagaagcacagctg

SEQ ID NO: 7462 - DNA, 40 bp, synthetic construct
  source 1..40: mol_type = other DNA
ctctcctcgaagatcgtggggtgagatgtacttgaggtgt

SEQ ID NO: 7463 - DNA, 40 bp, synthetic construct
  source 1..40: mol_type = other DNA
acggctcggaaggagggcctggctattgaggtcacgaatg

SEQ ID NO: 7464 - DNA, 40 bp, synthetic construct
  source 1..40: mol_type = other DNA
tcggcctcgcttggatggcgctcttgcgcgcccacgaacg

SEQ ID NO: 7465 - DNA, 40 bp, synthetic construct
  source 1..40: mol_type = other DNA
attcatgatgacgccaaggttcatacttctgcctcatttc

SEQ ID NO: 7466 - DNA, 40 bp, synthetic construct
  source 1..40: mol_type = other DNA
tattcctctctcagtctcattcagcttccactgttagacg

SEQ ID NO: 7467 - DNA, 40 bp, synthetic construct
  source 1..40: mol_type = other DNA
gaagggctttcaggtcttccaggtgaacactgcactgaat

SEQ ID NO: 7468 - DNA, 40 bp, synthetic construct
  source 1..40: mol_type = other DNA
agagatgagatctgtgctccgattgcagacggtttgagga

SEQ ID NO: 7469 - DNA, 40 bp, synthetic construct
  source 1..40: mol_type = other DNA
gtttgtagctcgtgtgttgtcttctgtctccagcattgta

SEQ ID NO: 7470 - DNA, 40 bp, synthetic construct
  source 1..40: mol_type = other DNA
aatcgtggctgaaggtgctgtcacaaggaagcgatcctga

SEQ ID NO: 7471 - DNA, 40 bp, synthetic construct
  source 1..40: mol_type = other DNA
ttttactacatctgcccatgtgtgtttgttttgcaccaag

SEQ ID NO: 7472 - DNA, 40 bp, synthetic construct
  source 1..40: mol_type = other DNA
agctgtctggagttcatcctgggtggccgggtacttttcc

SEQ ID NO: 7473 - DNA, 40 bp, synthetic construct
  source 1..40: mol_type = other DNA
gacagacgcattgttttccagtaaccaacgtagccttggg

SEQ ID NO: 7474 - DNA, 40 bp, synthetic construct
  source 1..40: mol_type = other DNA
gaaagtgtcctcttcactatggagtcaccgatgaatccac

SEQ ID NO: 7475 - DNA, 40 bp, synthetic construct
  source 1..40: mol_type = other DNA
cgtaacaactgttgcgggttgagcttgcatgaccagaacc

SEQ ID NO: 7476 - DNA, 40 bp, synthetic construct
  source 1..40: mol_type = other DNA
ccagagtcaattgtaccaccgatggtaccttctcggaagg

SEQ ID NO: 7477 - DNA, 40 bp, synthetic construct
  source 1..40: mol_type = other DNA
cgtcttccacgcagtgggtactccgtggcgaggtaggtgc

SEQ ID NO: 7478 - DNA, 40 bp, synthetic construct
  source 1..40: mol_type = other DNA
tactcggtgtgccggttggtggtgatgggtgtcagggttg

SEQ ID NO: 7479 - DNA, 40 bp, synthetic construct
  source 1..40: mol_type = other DNA
aaggtcccgtgggtggtgtttgttctcggtgacgatgcgg

SEQ ID NO: 7480 - DNA, 40 bp, synthetic construct
  source 1..40: mol_type = other DNA
tgttggcgccaggctcgtgggtggacagctcgctcgtgag

SEQ ID NO: 7481 - DNA, 40 bp, synthetic construct
  source 1..40: mol_type = other DNA
cgagaagtcgtacacgtggtaagatgtagttgcacgtccc

SEQ ID NO: 7482 - DNA, 40 bp, synthetic construct
  source 1..40: mol_type = other DNA
gcgacaaggtgggaccagggggtcaggaaccgtgtggtag

SEQ ID NO: 7483 - DNA, 40 bp, synthetic construct
  source 1..40: mol_type = other DNA
ccggaaatggtgaaactggcaagcacagtgggttcgtttc

SEQ ID NO: 7484 - DNA, 40 bp, synthetic construct
  source 1..40: mol_type = other DNA
ttgatcgtcatcctcctcttgggccgcgtctcttgggctt

SEQ ID NO: 7485 - DNA, 40 bp, synthetic construct
  source 1..40: mol_type = other DNA
gagagcgatgagcagcgaggtctaccggcgcaaaagaata

SEQ ID NO: 7486 - DNA, 40 bp, synthetic construct
  source 1..40: mol_type = other DNA
gattgaatcacattggaggacgctgagagaccaaacattg

SEQ ID NO: 7487 - DNA, 40 bp, synthetic construct
  source 1..40: mol_type = other DNA
cttaaagtccgcaaaacaactagccattgcctatatccta

SEQ ID NO: 7488 - DNA, 40 bp, synthetic construct
  source 1..40: mol_type = other DNA
acctgtggcagtttgaagccacagccattgttacatgcct

SEQ ID NO: 7489 - DNA, 40 bp, synthetic construct
  source 1..40: mol_type = other DNA
ccgtaaaagtcagaagcacaagccttctaacaagccaagt

SEQ ID NO: 7490 - DNA, 40 bp, synthetic construct
  source 1..40: mol_type = other DNA
tgggtttattctcatacagctttgagtatgtagggtcttc

SEQ ID NO: 7491 - DNA, 40 bp, synthetic construct
  source 1..40: mol_type = other DNA
aagtggcagtcaaactcttccagtaaaaccttcatcgagg

SEQ ID NO: 7492 - DNA, 40 bp, synthetic construct
  source 1..40: mol_type = other DNA
agatacatgctgaaaccaacagccaccgccaatatcaagc

SEQ ID NO: 7493 - DNA, 40 bp, synthetic construct
  source 1..40: mol_type = other DNA
tctagtgtctcaagcttctctggcaaggacattgtttttg

SEQ ID NO: 7494 - DNA, 40 bp, synthetic construct
  source 1..40: mol_type = other DNA
atactgcttggtataccaaggcgttagaagcagatggttt

SEQ ID NO: 7495 - DNA, 40 bp, synthetic construct
  source 1..40: mol_type = other DNA
aagacccgatccaaagcttccagggtaggaaggacgctca

SEQ ID NO: 7496 - DNA, 40 bp, synthetic construct
  source 1..40: mol_type = other DNA
atccacgggtgaggagacattgttatttcgagtcgtcacg

SEQ ID NO: 7497 - DNA, 40 bp, synthetic construct
  source 1..40: mol_type = other DNA
catcttgtgtcctgttttctggcaattctctcaggcttgc

SEQ ID NO: 7498 - DNA, 40 bp, synthetic construct
  source 1..40: mol_type = other DNA
cgatttcagctgcagcagcgtgggcacagcgggacgaatc

SEQ ID NO: 7499 - DNA, 40 bp, synthetic construct
  source 1..40: mol_type = other DNA
tctgcccaagatcaccgtcaccagggaccacccggtatgt

SEQ ID NO: 7500 - DNA, 40 bp, synthetic construct
  source 1..40: mol_type = other DNA
tcctgttccatctggacaacccgaaccctagactcaggtg

SEQ ID NO: 7501 - DNA, 40 bp, synthetic construct
  source 1..40: mol_type = other DNA
actgccggctaaagctgcgcggtggcataaatgtgggcat

SEQ ID NO: 7502 - DNA, 40 bp, synthetic construct
  source 1..40: mol_type = other DNA
aaaaaaagccagaccattggaagaagacactcaccacact

SEQ ID NO: 7503 - DNA, 40 bp, synthetic construct
  source 1..40: mol_type = other DNA
gacctatgaagatgccaagattcttcctccagaaaaactg

SEQ ID NO: 7504 - DNA, 40 bp, synthetic construct
  source 1..40: mol_type = other DNA
cggagaggcataggtcaacagtgacattggtgatgagtgg

SEQ ID NO: 7505 - DNA, 40 bp, synthetic construct
  source 1..40: mol_type = other DNA
taagcacacctgctaacaacacacgttcactatcaagagc

SEQ ID NO: 7506 - DNA, 40 bp, synthetic construct
  source 1..40: mol_type = other DNA
ttggtttccggacatcatggctggcatttagcccagacat

SEQ ID NO: 7507 - DNA, 40 bp, synthetic construct
  source 1..40: mol_type = other DNA
tggagattttcttccactctgagtctgggttcattgatag

SEQ ID NO: 7508 - DNA, 40 bp, synthetic construct
  source 1..40: mol_type = other DNA
ttgcaaagcatttcctcaggacaaatcaccaacagggaga

SEQ ID NO: 7509 - DNA, 40 bp, synthetic construct
  source 1..40: mol_type = other DNA
cgctggtcagactgctgctatgaccgcaggctagttttca

SEQ ID NO: 7510 - DNA, 40 bp, synthetic construct
  source 1..40: mol_type = other DNA
ccacaactgggtcatgattggatcactttcaacctgtcac

SEQ ID NO: 7511 - DNA, 40 bp, synthetic construct
  source 1..40: mol_type = other DNA
gacccatgtagaattccaggcatcgtgttctgcagcgtgc

SEQ ID NO: 7512 - DNA, 40 bp, synthetic construct
  source 1..40: mol_type = other DNA
tgtccgggccgtctcttttcgaacgttttggaaagaagcg

SEQ ID NO: 7513 - DNA, 40 bp, synthetic construct
  source 1..40: mol_type = other DNA
aaactctactccaacagtgaaggctctttgtgtactcgtc

SEQ ID NO: 7514 - DNA, 40 bp, synthetic construct
  source 1..40: mol_type = other DNA
acacctggtcaccacaggtcctttttgaacacttgacggc

SEQ ID NO: 7515 - DNA, 40 bp, synthetic construct
  source 1..40: mol_type = other DNA
ccggtttaatttttgactccagttgagttggagagatggt

SEQ ID NO: 7516 - DNA, 40 bp, synthetic construct
  source 1..40: mol_type = other DNA
gaaactcctgggttctccttgaccttactagcgcttcttt

SEQ ID NO: 7517 - DNA, 40 bp, synthetic construct
  source 1..40: mol_type = other DNA
gcataggcccagatcatgcctatacagggattgtaagacc

SEQ ID NO: 7518 - DNA, 40 bp, synthetic construct
  source 1..40: mol_type = other DNA
cctctacatgaattcacaaccacaaggtagaggtttgcca

SEQ ID NO: 7519 - DNA, 40 bp, synthetic construct
  source 1..40: mol_type = other DNA
gttggcatcaccagtggtgactgtgggctgcggcagtaaa

SEQ ID NO: 7520 - DNA, 40 bp, synthetic construct
  source 1..40: mol_type = other DNA
cagcactataaacagacaggctggcaaaaggtgatactac

SEQ ID NO: 7521 - DNA, 40 bp, synthetic construct
  source 1..40: mol_type = other DNA
gccattgtcactgctatggtctcactttaaagccaagact

SEQ ID NO: 7522 - DNA, 40 bp, synthetic construct
  source 1..40: mol_type = other DNA
cttgcagaggttaagttctgactatcttccacgaatcttg

SEQ ID NO: 7523 - DNA, 40 bp, synthetic construct
  source 1..40: mol_type = other DNA
ggatgttggttaagtttgtgatctgtgaactcgggtttgg

SEQ ID NO: 7524 - DNA, 40 bp, synthetic construct
  source 1..40: mol_type = other DNA
acgtctatgatcatgcccattgcccgaatatcgggaaaag

SEQ ID NO: 7525 - DNA, 40 bp, synthetic construct
  source 1..40: mol_type = other DNA
tgttcttgcccaagaatagcaaggaaggccctagcgtccc

SEQ ID NO: 7526 - DNA, 40 bp, synthetic construct
  source 1..40: mol_type = other DNA
cccgagtaccaaggctgagtcagcatagcggtcacagttc

SEQ ID NO: 7527 - DNA, 40 bp, synthetic construct
  source 1..40: mol_type = other DNA
agtagaagggcgctgcggcgagggccgccttaagtccatg

SEQ ID NO: 7528 - DNA, 40 bp, synthetic construct
  source 1..40: mol_type = other DNA
aaacaatacggagctgagccacaaggtccatcaatgtttc

SEQ ID NO: 7529 - DNA, 40 bp, synthetic construct
  source 1..40: mol_type = other DNA
cccttcagacctgaaatgggagctcaggtaatcgagacgc

SEQ ID NO: 7530 - DNA, 40 bp, synthetic construct
  source 1..40: mol_type = other DNA
ccactcagccaagaatgaggaagcccttggtgatattttg

SEQ ID NO: 7531 - DNA, 40 bp, synthetic construct
  source 1..40: mol_type = other DNA
aagccaatgaggaatgtccccggagttcagcgtgaagatg

SEQ ID NO: 7532 - DNA, 40 bp, synthetic construct
  source 1..40: mol_type = other DNA
ctggcatgcacaaatgcacatatgcgcacatacatacaca

SEQ ID NO: 7533 - DNA, 40 bp, synthetic construct
  source 1..40: mol_type = other DNA
gttgatgacggagaagatgtcagttgaagaagctgaagaa

SEQ ID NO: 7534 - DNA, 40 bp, synthetic construct
  source 1..40: mol_type = other DNA
gtagctctgtttgcccagggcaatgaggttccaagtctca

SEQ ID NO: 7535 - DNA, 40 bp, synthetic construct
  source 1..40: mol_type = other DNA
tgaacacttgctgaaactccgtcgtcattgcactcaggaa

SEQ ID NO: 7536 - DNA, 40 bp, synthetic construct
  source 1..40: mol_type = other DNA
agggtaacgtgatgcaatatacctgttcagtccaaagggt

SEQ ID NO: 7537 - DNA, 40 bp, synthetic construct
  source 1..40: mol_type = other DNA
tatatgtgagcccatcagtggcagagctggcattcattcg

SEQ ID NO: 7538 - DNA, 40 bp, synthetic construct
  source 1..40: mol_type = other DNA
gttagcagatctctgcagctggtgccatagccgggtttga

SEQ ID NO: 7539 - DNA, 40 bp, synthetic construct
  source 1..40: mol_type = other DNA
agggagccttgtgtacacgcttgatccagtcccgaaacag

SEQ ID NO: 7540 - DNA, 40 bp, synthetic construct
  source 1..40: mol_type = other DNA
ggttatcagtgtgatgagcaggatgccgccgctcagtgtt

SEQ ID NO: 7541 - DNA, 40 bp, synthetic construct
  source 1..40: mol_type = other DNA
gcactcctttccaaagtttttggaaggcattttcctagcg

SEQ ID NO: 7542 - DNA, 40 bp, synthetic construct
  source 1..40: mol_type = other DNA
cttagcttttagagccgggaggaccagaacgtgaagatgt

SEQ ID NO: 7543 - DNA, 40 bp, synthetic construct
  source 1..40: mol_type = other DNA
ttcgtagagagagagttgggggatgtgggctgttgaaatg

SEQ ID NO: 7544 - DNA, 40 bp, synthetic construct
  source 1..40: mol_type = other DNA
tgtgcactctgcaatgacctatggcagcgctctccttaag

SEQ ID NO: 7545 - DNA, 40 bp, synthetic construct
  source 1..40: mol_type = other DNA
accactttggaagacagtttgagtggttgtgaaataaagg

SEQ ID NO: 7546 - DNA, 40 bp, synthetic construct
  source 1..40: mol_type = other DNA
acatcaccaacgcagtcctttgcagatctggttttctgtt

SEQ ID NO: 7547 - DNA, 40 bp, synthetic construct
  source 1..40: mol_type = other DNA
tgttgcagtcgtgggtcccagtagttgcacttggcgttct

SEQ ID NO: 7548 - DNA, 40 bp, synthetic construct
  source 1..40: mol_type = other DNA
cgttgaaattcagcctccttcagctgtttggagaacatgt

SEQ ID NO: 7549 - DNA, 40 bp, synthetic construct
  source 1..40: mol_type = other DNA
ctttggactggagaattttcgactcttgggagaccgaata

SEQ ID NO: 7550 - DNA, 40 bp, synthetic construct
  source 1..40: mol_type = other DNA
tccaaatatgagagctgggattactagaagttaggagctg

SEQ ID NO: 7551 - DNA, 40 bp, synthetic construct
  source 1..40: mol_type = other DNA
ctcttctgaccattagtgcaggatccagcaatatcatatg

SEQ ID NO: 7552 - DNA, 40 bp, synthetic construct
  source 1..40: mol_type = other DNA
acattggtatgagacttcagctggtagattcacagagaga

SEQ ID NO: 7553 - DNA, 40 bp, synthetic construct
  source 1..40: mol_type = other DNA
attatcctcccgatatccacacatcttccaattgtgggat

SEQ ID NO: 7554 - DNA, 40 bp, synthetic construct
  source 1..40: mol_type = other DNA
agcaacgtaggagctagagcacagcaatcaatatgtccac

SEQ ID NO: 7555 - DNA, 40 bp, synthetic construct
  source 1..40: mol_type = other DNA
acggataaatcagatggtctgtgctagctgctgtatgtac

SEQ ID NO: 7556 - DNA, 40 bp, synthetic construct
  source 1..40: mol_type = other DNA
gggtaacgctggcacagctgccactgaacgcatgatgtct

SEQ ID NO: 7557 - DNA, 40 bp, synthetic construct
  source 1..40: mol_type = other DNA
acgccatggcacttacactcgcagagtacaggaaccactc

SEQ ID NO: 7558 - DNA, 40 bp, synthetic construct
  source 1..40: mol_type = other DNA
catctcgggtctctgcaccgggctgggcaccgatgataaa

SEQ ID NO: 7559 - DNA, 40 bp, synthetic construct
  source 1..40: mol_type = other DNA
accaacaaagactctagactggatcacaggcagtcctcta

SEQ ID NO: 7560 - DNA, 40 bp, synthetic construct
  source 1..40: mol_type = other DNA
gttgctgtaacaaaggaggaagatttggatgtctgtagtg

SEQ ID NO: 7561 - DNA, 40 bp, synthetic construct
  source 1..40: mol_type = other DNA
cgcatcttccttttgtagcaaaaaaatcagggcttacacc

SEQ ID NO: 7562 - DNA, 40 bp, synthetic construct
  source 1..40: mol_type = other DNA
tacagcaaggctaagggctcccaagggtgacggaagtctc

SEQ ID NO: 7563 - DNA, 40 bp, synthetic construct
  source 1..40: mol_type = other DNA
caccaggtttttcaagtagaaagaggttcaacgtggtcat

SEQ ID NO: 7564 - DNA, 40 bp, synthetic construct
  source 1..40: mol_type = other DNA
tgcagtagttctccagctgggcctgcgggctgcgtctagt

SEQ ID NO: 7565 - DNA, 40 bp, synthetic construct
  source 1..40: mol_type = other DNA
gcttgatttgttgcctctcagtacgttgccttgtactttt

SEQ ID NO: 7566 - DNA, 40 bp, synthetic construct
  source 1..40: mol_type = other DNA
caccctgtgttcctattgccgctcttgacaaaggcggttc

SEQ ID NO: 7567 - DNA, 40 bp, synthetic construct
  source 1..40: mol_type = other DNA
tgtgcattgtttcgcttagtctgctttgatctgttgacgc

SEQ ID NO: 7568 - DNA, 40 bp, synthetic construct
  source 1..40: mol_type = other DNA
ttatggcgagttccaacaccccataatcctgatcaatgcc

SEQ ID NO: 7569 - DNA, 40 bp, synthetic construct
  source 1..40: mol_type = other DNA
cgctggtgaaatttataaccgtggaacttctgtactacaa

SEQ ID NO: 7570 - DNA, 40 bp, synthetic construct
  source 1..40: mol_type = other DNA
ctggctatggtgtttatagctcacagtaaaccttccatct

SEQ ID NO: 7571 - DNA, 40 bp, synthetic construct
  source 1..40: mol_type = other DNA
gtgctgaagaacatgccgttcgtcattgtctctgtcatac

SEQ ID NO: 7572 - DNA, 40 bp, synthetic construct
  source 1..40: mol_type = other DNA
atccgggaatggccaacccattcagagtctaagctaagga

SEQ ID NO: 7573 - DNA, 40 bp, synthetic construct
  source 1..40: mol_type = other DNA
gtgttgcaagattggagggtctgttctgagaaacaggata

SEQ ID NO: 7574 - DNA, 40 bp, synthetic construct
  source 1..40: mol_type = other DNA
catggtcatcaggtacttgaccagtggtgatgccgacgat

SEQ ID NO: 7575 - DNA, 40 bp, synthetic construct
  source 1..40: mol_type = other DNA
atggcaatactgtagtcactcttgttggtgaatcttgtcc

SEQ ID NO: 7576 - DNA, 40 bp, synthetic construct
  source 1..40: mol_type = other DNA
atcagggactgttgtagccattcaggccattgcggcaacc

SEQ ID NO: 7577 - DNA, 40 bp, synthetic construct
  source 1..40: mol_type = other DNA
gatgatgaaggcgaaggtgacctgtgctcccgtccagtcc

SEQ ID NO: 7578 - DNA, 40 bp, synthetic construct
  source 1..40: mol_type = other DNA
tcggtcatgagggaaaatggtccaaatgatgagcttggga

SEQ ID NO: 7579 - DNA, 40 bp, synthetic construct
  source 1..40: mol_type = other DNA
gcggctgtagcgtcggaaggatgttgatggttgggaaggt

SEQ ID NO: 7580 - DNA, 40 bp, synthetic construct
  source 1..40: mol_type = other DNA
tgcctctacagaaccagttttctgctatatgctaaggtcc

SEQ ID NO: 7581 - DNA, 40 bp, synthetic construct
  source 1..40: mol_type = other DNA
tgaaatggctcctgtttagtgtttaaaatatctcccgcct

SEQ ID NO: 7582 - DNA, 40 bp, synthetic construct
  source 1..40: mol_type = other DNA
agagaagcgcgccggctgaggactgcagcagacgcccata

SEQ ID NO: 7583 - DNA, 40 bp, synthetic construct
  source 1..40: mol_type = other DNA
ttgcacatatcctcatcacacaccgacatatttatggagg

SEQ ID NO: 7584 - DNA, 40 bp, synthetic construct
  source 1..40: mol_type = other DNA
tcttctctgcttttgtcttcacttccaatgccttaactga

SEQ ID NO: 7585 - DNA, 40 bp, synthetic construct
  source 1..40: mol_type = other DNA
cttcactcccttctgggaagtgaatgttaagaggcaaccc

SEQ ID NO: 7586 - DNA, 40 bp, synthetic construct
  source 1..40: mol_type = other DNA
cacagatttcacatgtgccctccggtacaggcagcgtagg

SEQ ID NO: 7587 - DNA, 40 bp, synthetic construct
  source 1..40: mol_type = other DNA
gtgtttgcccgtggcccggttcacagctcgaggcaccgta

SEQ ID NO: 7588 - DNA, 40 bp, synthetic construct
  source 1..40: mol_type = other DNA
tcattgtcatcgatctgcagtggctttgaggtaggcatac

SEQ ID NO: 7589 - DNA, 40 bp, synthetic construct
  source 1..40: mol_type = other DNA
tcacagctcaagtacacctggtgtcgggattccgatgacc

SEQ ID NO: 7590 - DNA, 40 bp, synthetic construct
  source 1..40: mol_type = other DNA
aactgttctcgtcgtttccggctgttcaagtttgtgtttc

SEQ ID NO: 7591 - DNA, 40 bp, synthetic construct
  source 1..40: mol_type = other DNA
caaaaaagctccgttttagccgggatctggtcacgcaggg

SEQ ID NO: 7592 - DNA, 40 bp, synthetic construct
  source 1..40: mol_type = other DNA
gatgtggcttgggtttttcttgaagttcttatgtaccgga

SEQ ID NO: 7593 - DNA, 40 bp, synthetic construct
  source 1..40: mol_type = other DNA
gcctctcccgtcccgagaaaagtaacggcgacgctacacg

SEQ ID NO: 7594 - DNA, 40 bp, synthetic construct
  source 1..40: mol_type = other DNA
ccttcttgcgatggctctgccaggtagatttccgggagca

SEQ ID NO: 7595 - DNA, 40 bp, synthetic construct
  source 1..40: mol_type = other DNA
catgtaccagaaggtgaggtgccgtgatgaccgggttctg

SEQ ID NO: 7596 - DNA, 40 bp, synthetic construct
  source 1..40: mol_type = other DNA
cggactttatgagcgacaagatcttgaagatcgccgcact

SEQ ID NO: 7597 - DNA, 40 bp, synthetic construct
  source 1..40: mol_type = other DNA
acagctcttcagtactggtgctcacagtctctggttatag

SEQ ID NO: 7598 - DNA, 40 bp, synthetic construct
  source 1..40: mol_type = other DNA
gtctgaagtcatcccgaagtcatgacatccgaagggtttt

SEQ ID NO: 7599 - DNA, 40 bp, synthetic construct
  source 1..40: mol_type = other DNA
tgtggttgttgccagtattagcagctgatggagcagtcat

SEQ ID NO: 7600 - DNA, 40 bp, synthetic construct
  source 1..40: mol_type = other DNA
tcgggactttggcatctaaataagacagcacttcgttcag

SEQ ID NO: 7601 - DNA, 40 bp, synthetic construct
  source 1..40: mol_type = other DNA
tagaaaatgggctggtaggttgcactggtgttactgtcag

SEQ ID NO: 7602 - DNA, 40 bp, synthetic construct
  source 1..40: mol_type = other DNA
gtcttatccgattttcccagttcatactggtcagtccata

SEQ ID NO: 7603 - DNA, 40 bp, synthetic construct
  source 1..40: mol_type = other DNA
actttcccacgatactctatcaaattgctgtcgtaacatg

SEQ ID NO: 7604 - DNA, 40 bp, synthetic construct
  source 1..40: mol_type = other DNA
gagagttggtatattcggcaacagaatgtaggtaccaaag

SEQ ID NO: 7605 - DNA, 40 bp, synthetic construct
  source 1..40: mol_type = other DNA
aacctgaagctaccaggcaggtaggcctgataagcaggtc

SEQ ID NO: 7606 - DNA, 40 bp, synthetic construct
  source 1..40: mol_type = other DNA
gcatctgtatcaggcaaagtacaccatcgtaagtcaagta

SEQ ID NO: 7607 - DNA, 40 bp, synthetic construct
  source 1..40: mol_type = other DNA
ctgcccaactgtagaaactaaactccctctacctaaccag

SEQ ID NO: 7608 - DNA, 40 bp, synthetic construct
  source 1..40: mol_type = other DNA
agggtgtccagatgagaagaagaactaggatttgcttcca

SEQ ID NO: 7609 - DNA, 40 bp, synthetic construct
  source 1..40: mol_type = other DNA
ccaggcccacaggatattcatgaggccaccagaaaataaa

SEQ ID NO: 7610 - DNA, 40 bp, synthetic construct
  source 1..40: mol_type = other DNA
atgtcccggacaatctcacgcataacacagtttctccttg

SEQ ID NO: 7611 - DNA, 40 bp, synthetic construct
  source 1..40: mol_type = other DNA
tatgagcatcaggagagacacctgtgccttataggattga

SEQ ID NO: 7612 - DNA, 40 bp, synthetic construct
  source 1..40: mol_type = other DNA
cagagagtttagggtaactgacaaaggaataaccctgccc

SEQ ID NO: 7613 - DNA, 40 bp, synthetic construct
  source 1..40: mol_type = other DNA
cttcagcacagtctctgaagggtgtgtcctgatttgaata

SEQ ID NO: 7614 - DNA, 40 bp, synthetic construct
  source 1..40: mol_type = other DNA
caaactcatttcccagccaactgattagtcagttgcgaaa

SEQ ID NO: 7615 - DNA, 40 bp, synthetic construct
  source 1..40: mol_type = other DNA
cgtgcttcagcaaggtctccttggtcatggatgtttgctc

SEQ ID NO: 7616 - DNA, 40 bp, synthetic construct
  source 1..40: mol_type = other DNA
gactgaggcatttagacacctgtatgtgcagttaggcact

SEQ ID NO: 7617 - DNA, 40 bp, synthetic construct
  source 1..40: mol_type = other DNA
gctgatgaagacaaagagggaagcccagggcagaaccgat

SEQ ID NO: 7618 - DNA, 40 bp, synthetic construct
  source 1..40: mol_type = other DNA
cctgcgtaattgtgtctctttgtccctctgcttctaaata

SEQ ID NO: 7619 - DNA, 40 bp, synthetic construct
  source 1..40: mol_type = other DNA
agaaaatgctttcttgaggctttttctcgatgttctggcg

SEQ ID NO: 7620 - DNA, 40 bp, synthetic construct
  source 1..40: mol_type = other DNA
atggtaaagcctggtctcgtgtccgtgacaggtcgctttc

SEQ ID NO: 7621 - DNA, 40 bp, synthetic construct
  source 1..40: mol_type = other DNA
ttaagcacctgtttcttgcagttcaggaggtgaattagtg

SEQ ID NO: 7622 - DNA, 40 bp, synthetic construct
  source 1..40: mol_type = other DNA
ctagaccctagacatgtagagtccacaaagctgaacatgt

SEQ ID NO: 7623 - DNA, 40 bp, synthetic construct
  source 1..40: mol_type = other DNA
tcttctcatctgacagctgggtccaagacgatgttaatga

SEQ ID NO: 7624 - DNA, 40 bp, synthetic construct
  source 1..40: mol_type = other DNA
accagacagaagatgacagaaggccctgattacccagaat

SEQ ID NO: 7625 - DNA, 40 bp, synthetic construct
  source 1..40: mol_type = other DNA
gtcctccaattcccgcatctctggcctcactggcaaatcg

SEQ ID NO: 7626 - DNA, 40 bp, synthetic construct
  source 1..40: mol_type = other DNA
gatgtggtctctgagttccccatatggaggtgggcagtaa

SEQ ID NO: 7627 - DNA, 40 bp, synthetic construct
  source 1..40: mol_type = other DNA
taccacagcttgttcttcatccgaggtgccaaattcaaag

SEQ ID NO: 7628 - DNA, 40 bp, synthetic construct
  source 1..40: mol_type = other DNA
tgggtatccataatcgccattagtcatgatactgctggta

SEQ ID NO: 7629 - DNA, 40 bp, synthetic construct
  source 1..40: mol_type = other DNA
tgtgcggtagcaagtttctcatgccatccatgcctgagac

SEQ ID NO: 7630 - DNA, 40 bp, synthetic construct
  source 1..40: mol_type = other DNA
acaggtaacccgggaactaccccagaaccgtccttcagat

SEQ ID NO: 7631 - DNA, 40 bp, synthetic construct
  source 1..40: mol_type = other DNA
ggcgtagtcgctgaaacttgcagacaagtgcatagtactt

SEQ ID NO: 7632 - DNA, 40 bp, synthetic construct
  source 1..40: mol_type = other DNA
ggctgtactcgcagctctggacactggtagccaaccatga

SEQ ID NO: 7633 - DNA, 40 bp, synthetic construct
  source 1..40: mol_type = other DNA
tgatggagcagttgtggatggatgttgaagcaggtctcgt

SEQ ID NO: 7634 - DNA, 40 bp, synthetic construct
  source 1..40: mol_type = other DNA
ttgtgttccggcaagttccagcggcagttgaaggaaccaa

SEQ ID NO: 7635 - DNA, 40 bp, synthetic construct
  source 1..40: mol_type = other DNA
tggtgcacattttctgggtttccaagttttgacaggtacc

SEQ ID NO: 7636 - DNA, 40 bp, synthetic construct
  source 1..40: mol_type = other DNA
cgcaggtactgcatgcagttcggaacttgacggtgttccc

SEQ ID NO: 7637 - DNA, 40 bp, synthetic construct
  source 1..40: mol_type = other DNA
tgggcgtttagagttatacaccagtttgaagctactatca

SEQ ID NO: 7638 - DNA, 40 bp, synthetic construct
  source 1..40: mol_type = other DNA
aagatgcctacgcatccatttgcactctgtagtctggagc

SEQ ID NO: 7639 - DNA, 40 bp, synthetic construct
  source 1..40: mol_type = other DNA
tgcacccatcctgtcaaggtgggtgctctggaaagttcgc

SEQ ID NO: 7640 - DNA, 40 bp, synthetic construct
  source 1..40: mol_type = other DNA
tgtacagctctccgaaggcggaaggccctcgcgttctgcg

SEQ ID NO: 7641 - DNA, 40 bp, synthetic construct
  source 1..40: mol_type = other DNA
aaataggtggtgtccacagcaaggtcctttccaacaaaga

SEQ ID NO: 7642 - DNA, 40 bp, synthetic construct
  source 1..40: mol_type = other DNA
aacacagcggcagccaccgcacacctactgaaaataacgg

SEQ ID NO: 7643 - DNA, 40 bp, synthetic construct
  source 1..40: mol_type = other DNA
cttactgttctgcagatactctcacaggccggctctttcg

SEQ ID NO: 7644 - DNA, 40 bp, synthetic construct
  source 1..40: mol_type = other DNA
gggcagatcaagagaaacactctttttgtatgctgagcct

SEQ ID NO: 7645 - DNA, 40 bp, synthetic construct
  source 1..40: mol_type = other DNA
tcccggatctgctgctccattctccagtgagatacgcgat

SEQ ID NO: 7646 - DNA, 40 bp, synthetic construct
  source 1..40: mol_type = other DNA
gtccacatgctggccacctacaccttcctaccaacgtccg

SEQ ID NO: 7647 - DNA, 40 bp, synthetic construct
  source 1..40: mol_type = other DNA
atactgcctagttcactagctgtatttcttcagttctggc

SEQ ID NO: 7648 - DNA, 40 bp, synthetic construct
  source 1..40: mol_type = other DNA
gattgaaatgacaggtagcccatgaaggttttgctgctgt

SEQ ID NO: 7649 - DNA, 40 bp, synthetic construct
  source 1..40: mol_type = other DNA
ctcgtgggagcacttcactaatgaagagatgaatggagcg

SEQ ID NO: 7650 - DNA, 40 bp, synthetic construct
  source 1..40: mol_type = other DNA
aagacccgtggctgttgaggaggcgcgcacagacagaaga

SEQ ID NO: 7651 - DNA, 40 bp, synthetic construct
  source 1..40: mol_type = other DNA
ggtttctgagatgcgattgctacatatccggtggaagact

SEQ ID NO: 7652 - DNA, 40 bp, synthetic construct
  source 1..40: mol_type = other DNA
ccagtaaaaggttttgcacacttggctgatttccatgcaa

SEQ ID NO: 7653 - DNA, 40 bp, synthetic construct
  source 1..40: mol_type = other DNA
taatttctggaatgcacgagtatgggatctttggtggtga

SEQ ID NO: 7654 - DNA, 40 bp, synthetic construct
  source 1..40: mol_type = other DNA
ccggccaaacttagtcccagctgtttcaacttggtccttg

SEQ ID NO: 7655 - DNA, 40 bp, synthetic construct
  source 1..40: mol_type = other DNA
ccattcgccacccaacccgcctctgaggacgactcgctct

SEQ ID NO: 7656 - DNA, 40 bp, synthetic construct
  source 1..40: mol_type = other DNA
gtctctcggttggctaagtccacggtaactgaagatgctt

SEQ ID NO: 7657 - DNA, 40 bp, synthetic construct
  source 1..40: mol_type = other DNA
gttgatggtcctgatcgagaggagaaaattcacatgaggg

SEQ ID NO: 7658 - DNA, 40 bp, synthetic construct
  source 1..40: mol_type = other DNA
cctccggcaaagactcatgttgtgttcttgagctgctttt

SEQ ID NO: 7659 - DNA, 40 bp, synthetic construct
  source 1..40: mol_type = other DNA
catcctgagctagctgaacaggcttggatgccatcaatgt

SEQ ID NO: 7660 - DNA, 40 bp, synthetic construct
  source 1..40: mol_type = other DNA
tccaatatcactgtgggagaggacataagtgacctggttg

SEQ ID NO: 7661 - DNA, 40 bp, synthetic construct
  source 1..40: mol_type = other DNA
tccagccacaaggtcctttcctgaggacaggatccaccgg

SEQ ID NO: 7662 - DNA, 40 bp, synthetic construct
  source 1..40: mol_type = other DNA
ggtagacaccacgctcagggttcaacgctcactgcaaaca

SEQ ID NO: 7663 - DNA, 40 bp, synthetic construct
  source 1..40: mol_type = other DNA
ctccagaaactgctagtgaccactcagccttggcaagtag

SEQ ID NO: 7664 - DNA, 40 bp, synthetic construct
  source 1..40: mol_type = other DNA
ctgtgacgctctcaacttcactcggcctcgttaagcatcc

SEQ ID NO: 7665 - DNA, 40 bp, synthetic construct
  source 1..40: mol_type = other DNA
gccttctcctcgtactgctgccagtttatcataagcggcc

SEQ ID NO: 7666 - DNA, 40 bp, synthetic construct
  source 1..40: mol_type = other DNA
cgcaccaatacggcttctttagcctgaagaactgtccact

SEQ ID NO: 7667 - DNA, 40 bp, synthetic construct
  source 1..40: mol_type = other DNA
aggccacttatacgtgatttgtactgggtcggtcattagg

SEQ ID NO: 7668 - DNA, 40 bp, synthetic construct
  source 1..40: mol_type = other DNA
agctcacggttcaacatccttcatttctgacaggtgtgtg

SEQ ID NO: 7669 - DNA, 40 bp, synthetic construct
  source 1..40: mol_type = other DNA
gtaatccgacacgcaaaagagtgagtgagcggcctccagc

SEQ ID NO: 7670 - DNA, 40 bp, synthetic construct
  source 1..40: mol_type = other DNA
aaaaaggccgctgttgttttctcacttccaagaccgtcac

SEQ ID NO: 7671 - DNA, 40 bp, synthetic construct
  source 1..40: mol_type = other DNA
catcattagggaggaagcccaaagatgaatagttcctcgg

SEQ ID NO: 7672 - DNA, 40 bp, synthetic construct
  source 1..40: mol_type = other DNA
gtttccgctcatcggtctcctggcacaaagatgtagagcc

SEQ ID NO: 7673 - DNA, 40 bp, synthetic construct
  source 1..40: mol_type = other DNA
actaaagaggcggtcaataaggtgcagtggagtatgtata

SEQ ID NO: 7674 - DNA, 40 bp, synthetic construct
  source 1..40: mol_type = other DNA
ggaaggataaaacgcggtccaatgatcctagcttgacatc

SEQ ID NO: 7675 - DNA, 40 bp, synthetic construct
  source 1..40: mol_type = other DNA
acatagcgactcgttaactgggaagtaacgcagatccgaa

SEQ ID NO: 7676 - DNA, 40 bp, synthetic construct
  source 1..40: mol_type = other DNA
gattttggacaagagcatcccgcaggtgggcaagcgagtt

SEQ ID NO: 7677 - DNA, 40 bp, synthetic construct
  source 1..40: mol_type = other DNA
tcctgcttggcgagacgtgttgttcctgtatcaagcactg

SEQ ID NO: 7678 - DNA, 40 bp, synthetic construct
  source 1..40: mol_type = other DNA
ccttcagggcatctgataggcaccacgttgtcagtaacgc

SEQ ID NO: 7679 - DNA, 40 bp, synthetic construct
  source 1..40: mol_type = other DNA
gggagtgcatacacacgtgcagcttgtgtaaacacaagcg

SEQ ID NO: 7680 - DNA, 40 bp, synthetic construct
  source 1..40: mol_type = other DNA
tgatccatgctgagagtatcgaattaatttaaggaggcgc

SEQ ID NO: 7681 - DNA, 40 bp, synthetic construct
  source 1..40: mol_type = other DNA
gtgaactttacatccctcttcgctctgtgctgaagaccac

SEQ ID NO: 7682 - DNA, 40 bp, synthetic construct
  source 1..40: mol_type = other DNA
gcacccgacagacacgggctgacgcaggaaagttggctcg

SEQ ID NO: 7683 - DNA, 40 bp, synthetic construct
  source 1..40: mol_type = other DNA
tcaccaactgagtctggcttcattgtacggaatgacaagg

SEQ ID NO: 7684 - DNA, 40 bp, synthetic construct
  source 1..40: mol_type = other DNA
ctgtgactctctgctgtaaggtcgttgttgttgccgtggc

SEQ ID NO: 7685 - DNA, 40 bp, synthetic construct
  source 1..40: mol_type = other DNA
ttcttgtctcatttgttgggcttcctttgcactgtacact

SEQ ID NO: 7686 - DNA, 40 bp, synthetic construct
  source 1..40: mol_type = other DNA
caactgccgcaggcgggatcgcaggtagcatgttgtgcgg

SEQ ID NO: 7687 - DNA, 40 bp, synthetic construct
  source 1..40: mol_type = other DNA
ggcaaattagtagccacaatagccatcttgatcttcaggg

SEQ ID NO: 7688 - DNA, 40 bp, synthetic construct
  source 1..40: mol_type = other DNA
acatgagcgacaaactcaagtagtccataccctgttgcac

SEQ ID NO: 7689 - DNA, 40 bp, synthetic construct
  source 1..40: mol_type = other DNA
tgcccacatctttttctctcgcacctctcatcattccaca

SEQ ID NO: 7690 - DNA, 40 bp, synthetic construct
  source 1..40: mol_type = other DNA
cattcaacctgggctggtcctccactgcccttgagtggtg

SEQ ID NO: 7691 - DNA, 40 bp, synthetic construct
  source 1..40: mol_type = other DNA
gcccaagtgtgatggttctacaaactcaggcaaacagcag

SEQ ID NO: 7692 - DNA, 40 bp, synthetic construct
  source 1..40: mol_type = other DNA
tggaaaggcagaaggcttgacagttctccgctcacgaggg

SEQ ID NO: 7693 - DNA, 40 bp, synthetic construct
  source 1..40: mol_type = other DNA
cactccttgtgctaggagggcgcatgtcactcaaggcggg

SEQ ID NO: 7694 - DNA, 40 bp, synthetic construct
  source 1..40: mol_type = other DNA
aacagtcaacctccttctcctcatctttcagtgtgggtgc

SEQ ID NO: 7695 - DNA, 40 bp, synthetic construct
  source 1..40: mol_type = other DNA
actgatgacactgcctggcagtcagtcaaacgtgaagccc

SEQ ID NO: 7696 - DNA, 40 bp, synthetic construct
  source 1..40: mol_type = other DNA
tgctgtagcactcttcctgcgatgctgcacacattcagct

SEQ ID NO: 7697 - DNA, 40 bp, synthetic construct
  source 1..40: mol_type = other DNA
tggttggacagccaggctcagaagatgcaggctcaaagtc

SEQ ID NO: 7698 - DNA, 40 bp, synthetic construct
  source 1..40: mol_type = other DNA
acgttcacactgttttgtctaggcatccaccatacttgaa

SEQ ID NO: 7699 - DNA, 40 bp, synthetic construct
  source 1..40: mol_type = other DNA
gactgatttgatgtagccgggtcaccaaatggaatcaaag

SEQ ID NO: 7700 - DNA, 40 bp, synthetic construct
  source 1..40: mol_type = other DNA
tccgattgtatgtgagccaagagagaaagacatagtgatc

SEQ ID NO: 7701 - DNA, 40 bp, synthetic construct
  source 1..40: mol_type = other DNA
agctaaggatgctcccagatggctagataccattcaccat

SEQ ID NO: 7702 - DNA, 40 bp, synthetic construct
  source 1..40: mol_type = other DNA
ccgttcagctgcatcccatggcaccctgcagacggcattc

SEQ ID NO: 7703 - DNA, 40 bp, synthetic construct
  source 1..40: mol_type = other DNA
taatcgcactggtcaaagcctggcatccgacagccacccg

SEQ ID NO: 7704 - DNA, 40 bp, synthetic construct
  source 1..40: mol_type = other DNA
ctttgcgttcaaggtcaagactcttcttgcaaagattcca

SEQ ID NO: 7705 - DNA, 40 bp, synthetic construct
  source 1..40: mol_type = other DNA
ttggtagttagcagcttcaatgcaggcggccaatagtgtc

SEQ ID NO: 7706 - DNA, 40 bp, synthetic construct
  source 1..40: mol_type = other DNA
agaatcacctccaggtcctgggctgcaggcaccattatgg

SEQ ID NO: 7707 - DNA, 40 bp, synthetic construct
  source 1..40: mol_type = other DNA
gagggaccttacgagctccctttgacgcatttcccgcttt

SEQ ID NO: 7708 - DNA, 40 bp, synthetic construct
  source 1..40: mol_type = other DNA
tgcctttcacttggttgaaggctgtcagtgaagccgaaaa

SEQ ID NO: 7709 - DNA, 40 bp, synthetic construct
  source 1..40: mol_type = other DNA
ttaacagcccaaaaaggcagaaacccacccatgaactgca

SEQ ID NO: 7710 - DNA, 40 bp, synthetic construct
  source 1..40: mol_type = other DNA
gatgatccagcatggttttcgccatccagacacagaaaca

SEQ ID NO: 7711 - DNA, 40 bp, synthetic construct
  source 1..40: mol_type = other DNA
cttcattggtgaaggatgtccagccggccacgcaacaggt

SEQ ID NO: 7712 - DNA, 40 bp, synthetic construct
  source 1..40: mol_type = other DNA
gttgtggagcaatacggtacccatcggccacaggcacact

SEQ ID NO: 7713 - DNA, 40 bp, synthetic construct
  source 1..40: mol_type = other DNA
acatgtcagtcttgatgaccaaagaggtcaacagtctgga

SEQ ID NO: 7714 - DNA, 40 bp, synthetic construct
  source 1..40: mol_type = other DNA
gagtgagtgttcaagtcttcctgcagattcttgggttgtg

SEQ ID NO: 7715 - DNA, 40 bp, synthetic construct
  source 1..40: mol_type = other DNA
tctttgggacacttgctgctgctgaactcacatcacagct

SEQ ID NO: 7716 - DNA, 40 bp, synthetic construct
  source 1..40: mol_type = other DNA
agcaatgaggatgacagcgagcaggagcgcagagggcagt

SEQ ID NO: 7717 - DNA, 40 bp, synthetic construct
  source 1..40: mol_type = other DNA
tgacaaagcagcgcctcagaagaacctagagacttccttt

SEQ ID NO: 7718 - DNA, 40 bp, synthetic construct
  source 1..40: mol_type = other DNA
aatcacacatctgtgaagccacaccaagattcacactgtg

SEQ ID NO: 7719 - DNA, 40 bp, synthetic construct
  source 1..40: mol_type = other DNA
agacccactcatttgcagcatttgcacattgcattcccaa

SEQ ID NO: 7720 - DNA, 40 bp, synthetic construct
  source 1..40: mol_type = other DNA
tgcaggtgtaatgaagacctactgtatggaaaatgagagc

SEQ ID NO: 7721 - DNA, 40 bp, synthetic construct
  source 1..40: mol_type = other DNA
aaggaaagacatttcccttctctccacaacttaagagcaa

SEQ ID NO: 7722 - DNA, 40 bp, synthetic construct
  source 1..40: mol_type = other DNA
cttgcgagatgagcgaatgggaggagggtaatgtcacgtg

SEQ ID NO: 7723 - DNA, 40 bp, synthetic construct
  source 1..40: mol_type = other DNA
ccttagctcctgagtttaagccctttttcactgaattacc

SEQ ID NO: 7724 - DNA, 40 bp, synthetic construct
  source 1..40: mol_type = other DNA
cgtcagttccttgaggcggggttatctttaggtcctcgag

SEQ ID NO: 7725 - DNA, 40 bp, synthetic construct
  source 1..40: mol_type = other DNA
cgaaaagtcctcaacgtcctgggcaaagggttgaattggt

SEQ ID NO: 7726 - DNA, 40 bp, synthetic construct
  source 1..40: mol_type = other DNA
actccatctaccagtctcagatcttcctgaacattcagtg

SEQ ID NO: 7727 - DNA, 40 bp, synthetic construct
  source 1..40: mol_type = other DNA
acagtaatggtgaagggactaggcactgagaagtaagacc

SEQ ID NO: 7728 - DNA, 40 bp, synthetic construct
  source 1..40: mol_type = other DNA
ggactcccgagaccaggtcatttaagaagggtttaagcgg

SEQ ID NO: 7729 - DNA, 40 bp, synthetic construct
  source 1..40: mol_type = other DNA
ctgaaagaagccttctgggctctaatccgttgaaagctac

SEQ ID NO: 7730 - DNA, 40 bp, synthetic construct
  source 1..40: mol_type = other DNA
cggttgccttgatcccactcgtcttccatatacagcacaa

SEQ ID NO: 7731 - DNA, 40 bp, synthetic construct
  source 1..40: mol_type = other DNA
ttgacgggtttttcctgtcccgcagcagtatcctagtaca

SEQ ID NO: 7732 - DNA, 40 bp, synthetic construct
  source 1..40: mol_type = other DNA
ggaatacttcagtggctgagaagcatcctgtacataaagg

SEQ ID NO: 7733 - DNA, 40 bp, synthetic construct
  source 1..40: mol_type = other DNA
gtccagatgacttcggccttggacttgatggtcactgctt

SEQ ID NO: 7734 - DNA, 40 bp, synthetic construct
  source 1..40: mol_type = other DNA
agaccacattggcctatttctaagtatatccaaccgtccc

SEQ ID NO: 7735 - DNA, 40 bp, synthetic construct
  source 1..40: mol_type = other DNA
tgctcacgaagcaggtgaagagcgctgccgaaatcccgga

SEQ ID NO: 7736 - DNA, 40 bp, synthetic construct
  source 1..40: mol_type = other DNA
atgtgggtctttcgcagcagtattttgcccgtcttgtagc

SEQ ID NO: 7737 - DNA, 40 bp, synthetic construct
  source 1..40: mol_type = other DNA
tcattgcccaatttcccatcggaggtagaatgtcactgat

SEQ ID NO: 7738 - DNA, 40 bp, synthetic construct
  source 1..40: mol_type = other DNA
ggtggctcagttagttaaccttaaaatagccatgaggacc

SEQ ID NO: 7739 - DNA, 40 bp, synthetic construct
  source 1..40: mol_type = other DNA
ctgctgtgcacttgaattttttccttgctgactttgttcc

SEQ ID NO: 7740 - DNA, 40 bp, synthetic construct
  source 1..40: mol_type = other DNA
atcatcggtcttcagatgctgataccttgtagatatcctg

SEQ ID NO: 7741 - DNA, 40 bp, synthetic construct
  source 1..40: mol_type = other DNA
accagttgttgggttctgtggagccatctcctggaaagat

SEQ ID NO: 7742 - DNA, 40 bp, synthetic construct
  source 1..40: mol_type = other DNA
aggtgtccttggaaggattcgacctctgagtattcggtgg

SEQ ID NO: 7743 - DNA, 40 bp, synthetic construct
  source 1..40: mol_type = other DNA
tgttgtagtttcttggtagggtacttccaagggtactagg

SEQ ID NO: 7744 - DNA, 40 bp, synthetic construct
  source 1..40: mol_type = other DNA
ttgttcctgggagcttctccgagtgctgcaaggccatcga

SEQ ID NO: 7745 - DNA, 40 bp, synthetic construct
  source 1..40: mol_type = other DNA
gaatactgaaacagggttgtctgcgggaaaccgttttcca

SEQ ID NO: 7746 - DNA, 40 bp, synthetic construct
  source 1..40: mol_type = other DNA
gattgagagacactgttgtttggatgctgcaattactgtg

SEQ ID NO: 7747 - DNA, 40 bp, synthetic construct
  source 1..40: mol_type = other DNA
ttcccaccgttccctctacctgtaatgtctgagagcagtg

SEQ ID NO: 7748 - DNA, 40 bp, synthetic construct
  source 1..40: mol_type = other DNA
aagagactctgaatttgggccctctattctccctctaaac

SEQ ID NO: 7749 - DNA, 40 bp, synthetic construct
  source 1..40: mol_type = other DNA
aattccttcagtgacaggtgcactttgctccaattctgaa

SEQ ID NO: 7750 - DNA, 40 bp, synthetic construct
  source 1..40: mol_type = other DNA
cggagaagttacatccaaagaagaaaaggagggaactgaa

SEQ ID NO: 7751 - DNA, 40 bp, synthetic construct
  source 1..40: mol_type = other DNA
ttgttgctcatggtgtagtacattttccagggttaccaag

SEQ ID NO: 7752 - DNA, 40 bp, synthetic construct
  source 1..40: mol_type = other DNA
gttagacgttctagagcctggggtttcggttctccactgt

SEQ ID NO: 7753 - DNA, 40 bp, synthetic construct
  source 1..40: mol_type = other DNA
tcgaaagcagatgacacattttgtccaagggtgacatttt

SEQ ID NO: 7754 - DNA, 40 bp, synthetic construct
  source 1..40: mol_type = other DNA
agcgggtgccatcacggttagtattctcctttctggacat

SEQ ID NO: 7755 - DNA, 40 bp, synthetic construct
  source 1..40: mol_type = other DNA
ctgtgttgtttgctgcacagggatgtgaggatgtacaccc

SEQ ID NO: 7756 - DNA, 40 bp, synthetic construct
  source 1..40: mol_type = other DNA
aaccaaggccagtagcattcccctgtagaagtcacaatta

SEQ ID NO: 7757 - DNA, 40 bp, synthetic construct
  source 1..40: mol_type = other DNA
tggtgcttaaacacaagtgtacagtgaatcatcaaggcca

SEQ ID NO: 7758 - DNA, 40 bp, synthetic construct
  source 1..40: mol_type = other DNA
cccggttcattgtggccttgcaagtgcctaaaagggactc

SEQ ID NO: 7759 - DNA, 40 bp, synthetic construct
  source 1..40: mol_type = other DNA
cctgggtaacccgttttacagcccatctggagcttagggt

SEQ ID NO: 7760 - DNA, 40 bp, synthetic construct
  source 1..40: mol_type = other DNA
aactttggacagatgactcaccagctgttacaaaaccagt

SEQ ID NO: 7761 - DNA, 40 bp, synthetic construct
  source 1..40: mol_type = other DNA
gtcctcccagaattcatggcggctgtagtgggttaacggt

SEQ ID NO: 7762 - DNA, 40 bp, synthetic construct
  source 1..40: mol_type = other DNA
ccaatggtgcatccagctctctgctcatttcaaacaggag

SEQ ID NO: 7763 - DNA, 40 bp, synthetic construct
  source 1..40: mol_type = other DNA
ggccacgtgtagttgccatgccgggcccaagaactcaggg

SEQ ID NO: 7764 - DNA, 40 bp, synthetic construct
  source 1..40: mol_type = other DNA
gatgatcagcgtaccattggtggctcttgttcacattctg

SEQ ID NO: 7765 - DNA, 40 bp, synthetic construct
  source 1..40: mol_type = other DNA
gctcttcaacagaaacattggtagatgcgagtttgtgcca

SEQ ID NO: 7766 - DNA, 40 bp, synthetic construct
  source 1..40: mol_type = other DNA
cttctttcacttccttggtcaccacaggacagcgttgcca

SEQ ID NO: 7767 - DNA, 40 bp, synthetic construct
  source 1..40: mol_type = other DNA
cggcccatatacttggaatgtgtccgaatcaaaacttgtg

SEQ ID NO: 7768 - DNA, 40 bp, synthetic construct
  source 1..40: mol_type = other DNA
ttcatctggtggatgcgaatcaagcactgacagttcagaa

SEQ ID NO: 7769 - DNA, 40 bp, synthetic construct
  source 1..40: mol_type = other DNA
aaccagtgacaggagaaggatggttgcagtaaagggtgat

SEQ ID NO: 7770 - DNA, 40 bp, synthetic construct
  source 1..40: mol_type = other DNA
gttaagctcaccacttcattagagggattcattttccagg

SEQ ID NO: 7771 - DNA, 40 bp, synthetic construct
  source 1..40: mol_type = other DNA
gggatacaggtctctctcccggaggaggagatccattccc

SEQ ID NO: 7772 - DNA, 40 bp, synthetic construct
  source 1..40: mol_type = other DNA
ggtggactaaaggatctcatgctgttactgtcagccattg

SEQ ID NO: 7773 - DNA, 40 bp, synthetic construct
  source 1..40: mol_type = other DNA
gctgttaataatcccatgcatgacgcccaagaaaatggat

SEQ ID NO: 7774 - DNA, 40 bp, synthetic construct
  source 1..40: mol_type = other DNA
agcgtggaaccttcctttaactttgctctctatttgtagc

SEQ ID NO: 7775 - DNA, 40 bp, synthetic construct
  source 1..40: mol_type = other DNA
ggtcaccgttgctcctggctccattgcccacacatcgcaa

SEQ ID NO: 7776 - DNA, 40 bp, synthetic construct
  source 1..40: mol_type = other DNA
tgcttccagcaccgggtctgacacgcaccagcgagacgcc

SEQ ID NO: 7777 - DNA, 40 bp, synthetic construct
  source 1..40: mol_type = other DNA
acctcagtggctttgcctgggccgaagcactgtcacccgg

SEQ ID NO: 7778 - DNA, 40 bp, synthetic construct
  source 1..40: mol_type = other DNA
tgtgggtctcctggagtaaggcttcctagaaggtcatacc

SEQ ID NO: 7779 - DNA, 40 bp, synthetic construct
  source 1..40: mol_type = other DNA
tttatgcaactgtgccactgtggtgatccagggtaggatc

SEQ ID NO: 7780 - DNA, 40 bp, synthetic construct
  source 1..40: mol_type = other DNA
tgccataaggaagttcagtgttctttcaggacatcttctc

SEQ ID NO: 7781 - DNA, 40 bp, synthetic construct
  source 1..40: mol_type = other DNA
cacaccgtggtgctgtcctgcacgtgatgttgcatttcgt

SEQ ID NO: 7782 - DNA, 40 bp, synthetic construct
  source 1..40: mol_type = other DNA
aggtgccgccatttcgagttctcgccgatctgcttctcga

SEQ ID NO: 7783 - DNA, 40 bp, synthetic construct
  source 1..40: mol_type = other DNA
actctgggtgaacatacattgtgggaaccagtattaggag

SEQ ID NO: 7784 - DNA, 40 bp, synthetic construct
  source 1..40: mol_type = other DNA
cccagaagccctctccttttaagcaggaggtggaaactaa

SEQ ID NO: 7785 - DNA, 40 bp, synthetic construct
  source 1..40: mol_type = other DNA
tggcactggtaactgccctcgccagcaaactcctggatat

SEQ ID NO: 7786 - DNA, 40 bp, synthetic construct
  source 1..40: mol_type = other DNA
acctagacaggtccttcagctccgaagaaggaggcatcaa

SEQ ID NO: 7787 - DNA, 40 bp, synthetic construct
  source 1..40: mol_type = other DNA
ggagttggcgaagctggtgctgctcgaaggatgtgtcccg

SEQ ID NO: 7788 - DNA, 40 bp, synthetic construct
  source 1..40: mol_type = other DNA
ggccttccaagttctgagtcgaattggccatcatgatgca

SEQ ID NO: 7789 - DNA, 40 bp, synthetic construct
  source 1..40: mol_type = other DNA
aattttcaaccagtatggcccagtgccgtatggctgtgcc

SEQ ID NO: 7790 - DNA, 40 bp, synthetic construct
  source 1..40: mol_type = other DNA
ttgcagacacttggtgttcgcttcacctccaggtgtttac

SEQ ID NO: 7791 - DNA, 40 bp, synthetic construct
  source 1..40: mol_type = other DNA
aaccacatactccactgtggggattctgagcatagacact

SEQ ID NO: 7792 - DNA, 40 bp, synthetic construct
  source 1..40: mol_type = other DNA
ctgaacattgggtggtgtcccgcactcgatatccagtgag

SEQ ID NO: 7793 - DNA, 40 bp, synthetic construct
  source 1..40: mol_type = other DNA
caccatttgccagcagtgggacatccgggccacttgcaga

SEQ ID NO: 7794 - DNA, 40 bp, synthetic construct
  source 1..40: mol_type = other DNA
ctctttctcgtcctgccgggggcacctggtacttgaggca

SEQ ID NO: 7795 - DNA, 40 bp, synthetic construct
  source 1..40: mol_type = other DNA
cttcatgatactgctcctgcatatatccatcgcgtttagg

SEQ ID NO: 7796 - DNA, 40 bp, synthetic construct
  source 1..40: mol_type = other DNA
actatcgtcagacaggtcctccatcttcttcagtttttgg

SEQ ID NO: 7797 - DNA, 40 bp, synthetic construct
  source 1..40: mol_type = other DNA
aaggactacacagctcaccccacacgacagacatttattg

SEQ ID NO: 7798 - DNA, 40 bp, synthetic construct
  source 1..40: mol_type = other DNA
aaggctagtaagtttcccactgttttgaacaatgacgacc

SEQ ID NO: 7799 - DNA, 40 bp, synthetic construct
  source 1..40: mol_type = other DNA
tttgcagcagatctgagaattgtttggcagttctgaagag

SEQ ID NO: 7800 - DNA, 40 bp, synthetic construct
  source 1..40: mol_type = other DNA
aaagggcttccagaatctccggaaaacaccctcgcacaac

SEQ ID NO: 7801 - DNA, 40 bp, synthetic construct
  source 1..40: mol_type = other DNA
tggctgggtcatagcatggatttaaggtcaccttcgcgtg

SEQ ID NO: 7802 - DNA, 40 bp, synthetic construct
  source 1..40: mol_type = other DNA
ttattcagttgctggcaccttccactcagctaagaggtat

SEQ ID NO: 7803 - DNA, 40 bp, synthetic construct
  source 1..40: mol_type = other DNA
ctacgtccttacacacgaggataggagagaataccttggg

SEQ ID NO: 7804 - DNA, 40 bp, synthetic construct
  source 1..40: mol_type = other DNA
cctgtgatgaaggaagaagacccagatgaaatgtgttgat

SEQ ID NO: 7805 - DNA, 40 bp, synthetic construct
  source 1..40: mol_type = other DNA
gcgagtgtgggtgcaatgggagtgaccttattgccctttg

SEQ ID NO: 7806 - DNA, 40 bp, synthetic construct
  source 1..40: mol_type = other DNA
agaagggctatgcactggcagtcttcataagggagacaaa

SEQ ID NO: 7807 - DNA, 40 bp, synthetic construct
  source 1..40: mol_type = other DNA
attcacatccctttcatcagcagtatctggatgtccaata

SEQ ID NO: 7808 - DNA, 40 bp, synthetic construct
  source 1..40: mol_type = other DNA
attgccagctttgtaaagccctgaggtcaaggattgtaat

SEQ ID NO: 7809 - DNA, 40 bp, synthetic construct
  source 1..40: mol_type = other DNA
gcgctctgttgggagtcagttatggccattttcttcttgg

SEQ ID NO: 7810 - DNA, 40 bp, synthetic construct
  source 1..40: mol_type = other DNA
gttttgttctcacagctgtgcgttcgcctttctttcccgg

SEQ ID NO: 7811 - DNA, 40 bp, synthetic construct
  source 1..40: mol_type = other DNA
ggcgcttccattggtgggcgcacgtctatcaagacgagcg

SEQ ID NO: 7812 - DNA, 40 bp, synthetic construct
  source 1..40: mol_type = other DNA
aactagacgtgcaaggcgctgccatggtgatgcatcccag

SEQ ID NO: 7813 - DNA, 40 bp, synthetic construct
  source 1..40: mol_type = other DNA
agaacaaaacgtccatgttcgcagtctccatcacgaaatg

SEQ ID NO: 7814 - DNA, 40 bp, synthetic construct
  source 1..40: mol_type = other DNA
ttatccgctacatctgaatgtgcctaagaaaagagttcca

SEQ ID NO: 7815 - DNA, 40 bp, synthetic construct
  source 1..40: mol_type = other DNA
gtattgctttgcgttggacacatcacttggatgagttcat

SEQ ID NO: 7816 - DNA, 40 bp, synthetic construct
  source 1..40: mol_type = other DNA
cgcgttccacaaggacctgggtgcaggtgacggaggtccc

SEQ ID NO: 7817 - DNA, 40 bp, synthetic construct
  source 1..40: mol_type = other DNA
cattctggcgggtccaggaggtgggttttcacagcttcgc

SEQ ID NO: 7818 - DNA, 40 bp, synthetic construct
  source 1..40: mol_type = other DNA
tgggtttaccggtggacttgcagggacacgttgtacaggg

SEQ ID NO: 7819 - DNA, 40 bp, synthetic construct
  source 1..40: mol_type = other DNA
atggagttccaggactctatgggtctggctacagttggag

SEQ ID NO: 7820 - DNA, 40 bp, synthetic construct
  source 1..40: mol_type = other DNA
caaaccacacagacggaggggtggtggaaaaattctgctt

SEQ ID NO: 7821 - DNA, 40 bp, synthetic construct
  source 1..40: mol_type = other DNA
agggttctgtctgagttctggccagacttagactggctta

SEQ ID NO: 7822 - DNA, 40 bp, synthetic construct
  source 1..40: mol_type = other DNA
aagcgtggtcaggcttggaaaaaacagctcaacagctaga

SEQ ID NO: 7823 - DNA, 40 bp, synthetic construct
  source 1..40: mol_type = other DNA
gatggatgagtttgtgcctggtttcttccaatcaactggg

SEQ ID NO: 7824 - DNA, 40 bp, synthetic construct
  source 1..40: mol_type = other DNA
ctctaatgagtttagtccgatggacaaactgccttaagaa

SEQ ID NO: 7825 - DNA, 40 bp, synthetic construct
  source 1..40: mol_type = other DNA
aactgacgcggcctgcctgaagcttgtccatggccacaac

SEQ ID NO: 7826 - DNA, 40 bp, synthetic construct
  source 1..40: mol_type = other DNA
gcgggctttaagtgagtagggtggccgtggtttctgtcag

SEQ ID NO: 7827 - DNA, 40 bp, synthetic construct
  source 1..40: mol_type = other DNA
cgctttttattctgcggaaaacagagcatatagagtgacc

SEQ ID NO: 7828 - DNA, 40 bp, synthetic construct
  source 1..40: mol_type = other DNA
gtatccctggacgcactgatggacctctgtgtagagccct

SEQ ID NO: 7829 - DNA, 40 bp, synthetic construct
  source 1..40: mol_type = other DNA
gcatctgtgggtctccacgtgagatttcccagcttatgtt

SEQ ID NO: 7830 - DNA, 40 bp, synthetic construct
  source 1..40: mol_type = other DNA
cacctgaaactcatactgggccttgcagaggcttgacccg

SEQ ID NO: 7831 - DNA, 40 bp, synthetic construct
  source 1..40: mol_type = other DNA
agaccagtgatgattttcacggtatacctcaaactccaaa

SEQ ID NO: 7832 - DNA, 40 bp, synthetic construct
  source 1..40: mol_type = other DNA
ggatgtaccgaatttgtttgcagggctgagatgccgtcga

SEQ ID NO: 7833 - DNA, 40 bp, synthetic construct
  source 1..40: mol_type = other DNA
ctcaggtcaaaaggagcctcctccttcccgatagacgaca

SEQ ID NO: 7834 - DNA, 40 bp, synthetic construct
  source 1..40: mol_type = other DNA
agataaggtccattcatccataccagtcctttaagccaac

SEQ ID NO: 7835 - DNA, 40 bp, synthetic construct
  source 1..40: mol_type = other DNA
tcactggtgctgtccggcacacacctggaagttgtacaga

SEQ ID NO: 7836 - DNA, 40 bp, synthetic construct
  source 1..40: mol_type = other DNA
cgactaaggagtggcgagctctcgggcgcacgtcttgcct

SEQ ID NO: 7837 - DNA, 40 bp, synthetic construct
  source 1..40: mol_type = other DNA
agtgagagggcaagcgctccaagctcagccagaaagtcgg

SEQ ID NO: 7838 - DNA, 40 bp, synthetic construct
  source 1..40: mol_type = other DNA
ttctctgaggccgtgaagttgctgcatgacccgactggta

SEQ ID NO: 7839 - DNA, 40 bp, synthetic construct
  source 1..40: mol_type = other DNA
cgctgtccacacggaaggctcacgctgtctccaaacccag

SEQ ID NO: 7840 - DNA, 40 bp, synthetic construct
  source 1..40: mol_type = other DNA
gtccatgatgtcgtcagccggtttcagcgaggcttgtggg

SEQ ID NO: 7841 - DNA, 40 bp, synthetic construct
  source 1..40: mol_type = other DNA
atgttgttttcagccagctttcaccgcgaagatgggctgg

SEQ ID NO: 7842 - DNA, 40 bp, synthetic construct
  source 1..40: mol_type = other DNA
tcctggaagtaatccgggcaatcttcggaagaacggatga

SEQ ID NO: 7843 - DNA, 40 bp, synthetic construct
  source 1..40: mol_type = other DNA
tggacactaggaatgtgtaaggcagcattgacgtcagaat

SEQ ID NO: 7844 - DNA, 40 bp, synthetic construct
  source 1..40: mol_type = other DNA
accaatcagcaaaggagtgaatgccagctacgattacgaa

SEQ ID NO: 7845 - DNA, 40 bp, synthetic construct
  source 1..40: mol_type = other DNA
tttgtcacgtatcaggttctccaatccaaaacagaattgc

SEQ ID NO: 7846 - DNA, 40 bp, synthetic construct
  source 1..40: mol_type = other DNA
cactttatttctcacaggtgcatagtcaagagtcaggata

SEQ ID NO: 7847 - DNA, 40 bp, synthetic construct
  source 1..40: mol_type = other DNA
aattgttgaagctgagctggtttcagaaagaacagcgttg

SEQ ID NO: 7848 - DNA, 40 bp, synthetic construct
  source 1..40: mol_type = other DNA
ccattctgattggcatagtacacttcccttggtatttgag

SEQ ID NO: 7849 - DNA, 40 bp, synthetic construct
  source 1..40: mol_type = other DNA
gacaaaacctttgtgaacagactaatagcagtggaaagga

SEQ ID NO: 7850 - DNA, 40 bp, synthetic construct
  source 1..40: mol_type = other DNA
ggataccatatacccagtgcggattatgtctcttgtttgg

SEQ ID NO: 7851 - DNA, 40 bp, synthetic construct
  source 1..40: mol_type = other DNA
cccagtcggaggctctgagagaaggagcagttcaaaatga

SEQ ID NO: 7852 - DNA, 40 bp, synthetic construct
  source 1..40: mol_type = other DNA
caaagtggccgtcgtggctggtggcggagagcagacagag

SEQ ID NO: 7853 - DNA, 40 bp, synthetic construct
  source 1..40: mol_type = other DNA
cctgttagaaagcatttctgtgcttccctggaaagatggg

SEQ ID NO: 7854 - DNA, 40 bp, synthetic construct
  source 1..40: mol_type = other DNA
acacccacatttgaagtagccatggaacgtggttactgaa

SEQ ID NO: 7855 - DNA, 40 bp, synthetic construct
  source 1..40: mol_type = other DNA
gaatgacagaggcaaaaacccagtaggagaacagcacccg

SEQ ID NO: 7856 - DNA, 40 bp, synthetic construct
  source 1..40: mol_type = other DNA
gacagaaaactggattctgctaagtggctcaacccgatat

SEQ ID NO: 7857 - DNA, 40 bp, synthetic construct
  source 1..40: mol_type = other DNA
agattgcatagcaatagggcctgaagagtggttttggacc

SEQ ID NO: 7858 - DNA, 40 bp, synthetic construct
  source 1..40: mol_type = other DNA
ggagaaggtcataggaatttattgccaaagggataatcgg

SEQ ID NO: 7859 - DNA, 40 bp, synthetic construct
  source 1..40: mol_type = other DNA
cccgtgccaggattctgcccgtccttgaagttgatctccc

SEQ ID NO: 7860 - DNA, 40 bp, synthetic construct
  source 1..40: mol_type = other DNA
gttgtttcgggcttcaggccccgccagccttacggcgtac

SEQ ID NO: 7861 - DNA, 40 bp, synthetic construct
  source 1..40: mol_type = other DNA
gttcatgtccgggatgtagatattgccctgccatgcggga

SEQ ID NO: 7862 - DNA, 40 bp, synthetic construct
  source 1..40: mol_type = other DNA
gacaaatggaatgccagtgttgcatcgtccgggatgctct

SEQ ID NO: 7863 - DNA, 40 bp, synthetic construct
  source 1..40: mol_type = other DNA
atcggtgctcaaagcaatcacccacagcctcaaaccagaa

SEQ ID NO: 7864 - DNA, 40 bp, synthetic construct
  source 1..40: mol_type = other DNA
tacccagaggaagctatagagtctcaatagcctcttctag

SEQ ID NO: 7865 - DNA, 40 bp, synthetic construct
  source 1..40: mol_type = other DNA
tatcaaaggccttgactactaggatttccatagtgccaat

SEQ ID NO: 7866 - DNA, 40 bp, synthetic construct
  source 1..40: mol_type = other DNA
gtgttggagaagctgcaggtttagcacgaagctctccgat

SEQ ID NO: 7867 - DNA, 40 bp, synthetic construct
  source 1..40: mol_type = other DNA
tggactctcttgatggtgcgccggactcaggactccgaac

SEQ ID NO: 7868 - DNA, 40 bp, synthetic construct
  source 1..40: mol_type = other DNA
gcagaggttacggcagtttgagtaaccgggttcctgaacg

SEQ ID NO: 7869 - DNA, 40 bp, synthetic construct
  source 1..40: mol_type = other DNA
gtgggagtggtcttccattaaagggcttgatatcaaagga

SEQ ID NO: 7870 - DNA, 40 bp, synthetic construct
  source 1..40: mol_type = other DNA
gtagctgcacgtgttccgtgcgtcttcttgatcacctgca

SEQ ID NO: 7871 - DNA, 40 bp, synthetic construct
  source 1..40: mol_type = other DNA
tctgacacgcagccaggtttgaagtagatgttcatcccgt

SEQ ID NO: 7872 - DNA, 40 bp, synthetic construct
  source 1..40: mol_type = other DNA
tggatgtagttcttgtggcagaaccttgaggctacagaga

SEQ ID NO: 7873 - DNA, 40 bp, synthetic construct
  source 1..40: mol_type = other DNA
gtcgttgcggatgctacgagacgtccagcccgaccttcca

SEQ ID NO: 7874 - DNA, 40 bp, synthetic construct
  source 1..40: mol_type = other DNA
tgttgacctgggcctcgacagatgctgccgtggatgccta

SEQ ID NO: 7875 - DNA, 40 bp, synthetic construct
  source 1..40: mol_type = other DNA
ctgtcttgaaaaactgatgcagctggccctcgcttatgat

SEQ ID NO: 7876 - DNA, 40 bp, synthetic construct
  source 1..40: mol_type = other DNA
gcgggaagaacttgcattgattgatatcatctagtccgga

SEQ ID NO: 7877 - DNA, 40 bp, synthetic construct
  source 1..40: mol_type = other DNA
gtggaaggtgttgatgatggcccagcttcacagagtattg

SEQ ID NO: 7878 - DNA, 40 bp, synthetic construct
  source 1..40: mol_type = other DNA
agggtgagtacagtccatggctgaagctgaagtttcccaa

SEQ ID NO: 7879 - DNA, 40 bp, synthetic construct
  source 1..40: mol_type = other DNA
agtttgttccttcagagcagggtttcttcaatcccagtta

SEQ ID NO: 7880 - DNA, 40 bp, synthetic construct
  source 1..40: mol_type = other DNA
agccaatggtggcatacacaggccgtgttgacgataccgg

SEQ ID NO: 7881 - DNA, 40 bp, synthetic construct
  source 1..40: mol_type = other DNA
attgatcatccagctgtgacctccaaagaaaagcgactat

SEQ ID NO: 7882 - DNA, 40 bp, synthetic construct
  source 1..40: mol_type = other DNA
atgaaacatcattggcagcgatgaaaacggatggtggcaa

SEQ ID NO: 7883 - DNA, 40 bp, synthetic construct
  source 1..40: mol_type = other DNA
gcctcttccagtcagccagcaatgcaggcaatctgttgcc

SEQ ID NO: 7884 - DNA, 40 bp, synthetic construct
  source 1..40: mol_type = other DNA
gtaccaaatgatggatgcccgaatcgttggttgacacgtt

SEQ ID NO: 7885 - DNA, 40 bp, synthetic construct
  source 1..40: mol_type = other DNA
aaacacgacctaactgttcagagtaggtttttctctttgg

SEQ ID NO: 7886 - DNA, 40 bp, synthetic construct
  source 1..40: mol_type = other DNA
actgtaggcatggccgacagcctcgttggcaaagcttcga

SEQ ID NO: 7887 - DNA, 40 bp, synthetic construct
  source 1..40: mol_type = other DNA
aacagaccactgggtgggcacctccaagtgtaagggagtc

SEQ ID NO: 7888 - DNA, 40 bp, synthetic construct
  source 1..40: mol_type = other DNA
tgttgagcgcgaccctcagtcttggaccacaacaggtggt

SEQ ID NO: 7889 - DNA, 40 bp, synthetic construct
  source 1..40: mol_type = other DNA
tagtcggtgtcctccaacctccttcatccgtttcccaaat

SEQ ID NO: 7890 - DNA, 40 bp, synthetic construct
  source 1..40: mol_type = other DNA
aagagcacccgtaactgtaaggacgacgtcttcccgacgc

SEQ ID NO: 7891 - DNA, 40 bp, synthetic construct
  source 1..40: mol_type = other DNA
gtagcaccatgtgagaccacaggcgtgtttacatgcaggc

SEQ ID NO: 7892 - DNA, 40 bp, synthetic construct
  source 1..40: mol_type = other DNA
tctcggagctctgatgtgttacacgggttcaggtaccgct

SEQ ID NO: 7893 - DNA, 40 bp, synthetic construct
  source 1..40: mol_type = other DNA
ctctctccatctttaatgggtgacacagagatccgcagtc

SEQ ID NO: 7894 - DNA, 40 bp, synthetic construct
  source 1..40: mol_type = other DNA
gataagcctatgccaactactcccaggccacttcatcaca

SEQ ID NO: 7895 - DNA, 40 bp, synthetic construct
  source 1..40: mol_type = other DNA
ttccctagacaaaactcctgctccaagaatttcctacaag

SEQ ID NO: 7896 - DNA, 40 bp, synthetic construct
  source 1..40: mol_type = other DNA
acctcgcgctgagttccagggcagccggagggaactctgg

SEQ ID NO: 7897 - DNA, 40 bp, synthetic construct
  source 1..40: mol_type = other DNA
gtcaaggctttttacagcttgtgatcctgttgttggacag

SEQ ID NO: 7898 - DNA, 40 bp, synthetic construct
  source 1..40: mol_type = other DNA
aagcggaaattttcttcccgttgtccatgataagaccagg

SEQ ID NO: 7899 - DNA, 40 bp, synthetic construct
  source 1..40: mol_type = other DNA
ggaaagaattgccagccattatctggaaggaagttttcct

SEQ ID NO: 7900 - DNA, 40 bp, synthetic construct
  source 1..40: mol_type = other DNA
acatcgaagttgacaaggtaagaggaggagtattagaaga

SEQ ID NO: 7901 - DNA, 40 bp, synthetic construct
  source 1..40: mol_type = other DNA
caatgttagccatgcccaggagtcctgctcttttccaggt

SEQ ID NO: 7902 - DNA, 40 bp, synthetic construct
  source 1..40: mol_type = other DNA
ccgagctattgctggccggccctgtcctcacagattgcgt

SEQ ID NO: 7903 - DNA, 40 bp, synthetic construct
  source 1..40: mol_type = other DNA
ctactatgttgtaacagctggaggaccagcaacagagtgg

SEQ ID NO: 7904 - DNA, 40 bp, synthetic construct
  source 1..40: mol_type = other DNA
cttgagggttactgagattctcagcagcacttattttcgt

SEQ ID NO: 7905 - DNA, 40 bp, synthetic construct
  source 1..40: mol_type = other DNA
ttgggtagtgtttcaggcatcagctgaatagcaggaatta

SEQ ID NO: 7906 - DNA, 40 bp, synthetic construct
  source 1..40: mol_type = other DNA
ggatcatttcctgttatctgaataagtgaccacagggaat

SEQ ID NO: 7907 - DNA, 40 bp, synthetic construct
  source 1..40: mol_type = other DNA
cgagttccgagcctcggaggcggccctggaaaccgaaggc

SEQ ID NO: 7908 - DNA, 40 bp, synthetic construct
  source 1..40: mol_type = other DNA
tttcagtgctcatggtgtccctccacgtcccggatcatgc

SEQ ID NO: 7909 - DNA, 40 bp, synthetic construct
  source 1..40: mol_type = other DNA
ccagactcggcaaagtcgagtgatcccaaagtagacctgc

SEQ ID NO: 7910 - DNA, 40 bp, synthetic construct
  source 1..40: mol_type = other DNA
caggattatccatgtttctgcctgtctccgcttttttctt

SEQ ID NO: 7911 - DNA, 40 bp, synthetic construct
  source 1..40: mol_type = other DNA
tttgggttcgaattccatgtgtttgcgtactctgcctttg

SEQ ID NO: 7912 - DNA, 40 bp, synthetic construct
  source 1..40: mol_type = other DNA
gatagacatccatgaacttctggatggcagtagctgcgct

SEQ ID NO: 7913 - DNA, 40 bp, synthetic construct
  source 1..40: mol_type = other DNA
tcgttctgtatcagtctttccagcgtggtttctgtatcga

SEQ ID NO: 7914 - DNA, 40 bp, synthetic construct
  source 1..40: mol_type = other DNA
gacggaatgtgggctcgagtctgcatgattctgagcaggt

SEQ ID NO: 7915 - DNA, 40 bp, synthetic construct
  source 1..40: mol_type = other DNA
ggttttctcagaggtgaggccatggtattggtggaaaaga

SEQ ID NO: 7916 - DNA, 40 bp, synthetic construct
  source 1..40: mol_type = other DNA
ggatgatgcagaaagcaatagtaggcggatgggcgtctcc

SEQ ID NO: 7917 - DNA, 40 bp, synthetic construct
  source 1..40: mol_type = other DNA
tgaaggatggcagcaaagtatgtaaccgtgggtgtcaccg

SEQ ID NO: 7918 - DNA, 40 bp, synthetic construct
  source 1..40: mol_type = other DNA
cttctcttctagcagttagtgcaccagtataacccagagt

SEQ ID NO: 7919 - DNA, 40 bp, synthetic construct
  source 1..40: mol_type = other DNA
gctgcgcttaaggacatttcacttgaagctccaactcagg

SEQ ID NO: 7920 - DNA, 40 bp, synthetic construct
  source 1..40: mol_type = other DNA
ttcctgttaattccactacgttctacgtcaccctcatgat

SEQ ID NO: 7921 - DNA, 40 bp, synthetic construct
  source 1..40: mol_type = other DNA
cattaagaggactcatcgttggaccattttctactcctag

SEQ ID NO: 7922 - DNA, 40 bp, synthetic construct
  source 1..40: mol_type = other DNA
tggattctctgtgatcttgttttttctcgccggtactgac

SEQ ID NO: 7923 - DNA, 40 bp, synthetic construct
  source 1..40: mol_type = other DNA
gtgtcattctgcagagcctgcccgcatgttcaagaagacg

SEQ ID NO: 7924 - DNA, 40 bp, synthetic construct
  source 1..40: mol_type = other DNA
acgtggcatgtcacggactttgggattcgtgtagtgcttc

SEQ ID NO: 7925 - DNA, 40 bp, synthetic construct
  source 1..40: mol_type = other DNA
cacttgtactccttgccattgggctttgttggagaccttg

SEQ ID NO: 7926 - DNA, 40 bp, synthetic construct
  source 1..40: mol_type = other DNA
gttgtgcagagcctcatgcaaggctcttctgtgtgtagtg

SEQ ID NO: 7927 - DNA, 40 bp, synthetic construct
  source 1..40: mol_type = other DNA
ccaatgatatgacttcaccaggaatgtgtactagtcccat

SEQ ID NO: 7928 - DNA, 40 bp, synthetic construct
  source 1..40: mol_type = other DNA
gtacgtatttggagttgaacacagtcctttgcatgcagat

SEQ ID NO: 7929 - DNA, 40 bp, synthetic construct
  source 1..40: mol_type = other DNA
atgttgttcctcacagaaccagctctgcagcccataagca

SEQ ID NO: 7930 - DNA, 40 bp, synthetic construct
  source 1..40: mol_type = other DNA
tgtgagatgggcttttcatcgcaggtagcagtgttcatac

SEQ ID NO: 7931 - DNA, 40 bp, synthetic construct
  source 1..40: mol_type = other DNA
ggcgttggcgctaaggttgagagtggtccactgtcttgag

SEQ ID NO: 7932 - DNA, 40 bp, synthetic construct
  source 1..40: mol_type = other DNA
tattcggccgtgggtccctggcaggattccggctcacggc

SEQ ID NO: 7933 - DNA, 40 bp, synthetic construct
  source 1..40: mol_type = other DNA
cgaggacagcgggtgctctgctctagtcgctgtggtgttc

SEQ ID NO: 7934 - DNA, 40 bp, synthetic construct
  source 1..40: mol_type = other DNA
aggcagacaaaagggttgaggtggaaagcagaagtctaag

SEQ ID NO: 7935 - DNA, 40 bp, synthetic construct
  source 1..40: mol_type = other DNA
aagcaattgaggaatgtctctgtaggctcagaatatgtct

SEQ ID NO: 7936 - DNA, 40 bp, synthetic construct
  source 1..40: mol_type = other DNA
cactgcatcgattttgctccgtgtggtccatccttggaag

SEQ ID NO: 7937 - DNA, 40 bp, synthetic construct
  source 1..40: mol_type = other DNA
gcgtcctcttttgaacatggccagggcctatgcaaagaca

SEQ ID NO: 7938 - DNA, 40 bp, synthetic construct
  source 1..40: mol_type = other DNA
tctagcctagaaatgcatgagcatcaaatctagaaggttc

SEQ ID NO: 7939 - DNA, 40 bp, synthetic construct
  source 1..40: mol_type = other DNA
acaggctcaagttccatctgatggattcctttgcctcttg

SEQ ID NO: 7940 - DNA, 40 bp, synthetic construct
  source 1..40: mol_type = other DNA
atacatgtgtacatcaccctcaaggcaaatgtgtgaaagg

SEQ ID NO: 7941 - DNA, 40 bp, synthetic construct
  source 1..40: mol_type = other DNA
actaaccgacttggctgctttgggcaccaatcatgcttcc

SEQ ID NO: 7942 - DNA, 40 bp, synthetic construct
  source 1..40: mol_type = other DNA
ccatgtggtactgaaccaaggttaaccattgagtgttcac

SEQ ID NO: 7943 - DNA, 40 bp, synthetic construct
  source 1..40: mol_type = other DNA
ggctgaagtcctgtgggcaggaaggcccggtcgaagttca

SEQ ID NO: 7944 - DNA, 40 bp, synthetic construct
  source 1..40: mol_type = other DNA
aggaagagctgaagttctccctcgttttctccatagtcat

SEQ ID NO: 7945 - DNA, 40 bp, synthetic construct
  source 1..40: mol_type = other DNA
ccactcctgaaaactgaaaactgtaggtgctgaaatcaac

SEQ ID NO: 7946 - DNA, 40 bp, synthetic construct
  source 1..40: mol_type = other DNA
aagaacttggccacaggtccccacgagacatacagcaact

SEQ ID NO: 7947 - DNA, 40 bp, synthetic construct
  source 1..40: mol_type = other DNA
ttagcgggtagttcatggctctcgaggtccatttccagcg

SEQ ID NO: 7948 - DNA, 40 bp, synthetic construct
  source 1..40: mol_type = other DNA
ctaaggtgatgccacggaggtgtttcttacacttccctgc

SEQ ID NO: 7949 - DNA, 40 bp, synthetic construct
  source 1..40: mol_type = other DNA
ctggccaaacacccattcatagtaggctcttgcacatgac

SEQ ID NO: 7950 - DNA, 40 bp, synthetic construct
  source 1..40: mol_type = other DNA
ccttggtttcagcattcttgtaggagtcacatgtcatccc

SEQ ID NO: 7951 - DNA, 40 bp, synthetic construct
  source 1..40: mol_type = other DNA
gggtgttgttttctcccatggtctgcgtacttccagacca

SEQ ID NO: 7952 - DNA, 40 bp, synthetic construct
  source 1..40: mol_type = other DNA
tccttcagtccggttttattgtaaatttctcatgggcagc

SEQ ID NO: 7953 - DNA, 40 bp, synthetic construct
  source 1..40: mol_type = other DNA
acgacgttcatttcctctgcgataccgaaacgtgaccggt

SEQ ID NO: 7954 - DNA, 40 bp, synthetic construct
  source 1..40: mol_type = other DNA
acgagttttttgtagcgtcgtttatgctctactgacggcg

SEQ ID NO: 7955 - DNA, 40 bp, synthetic construct
  source 1..40: mol_type = other DNA
atttggcggtgaccgctgatcactagcatgatgtaaatcg

SEQ ID NO: 7956 - DNA, 40 bp, synthetic construct
  source 1..40: mol_type = other DNA
cctttagcattcgtacaggcaggagggtcaaactataaca

SEQ ID NO: 7957 - DNA, 40 bp, synthetic construct
  source 1..40: mol_type = other DNA
gacctccgatcactcctggctggtctcgcccgaaagccat

SEQ ID NO: 7958 - DNA, 40 bp, synthetic construct
  source 1..40: mol_type = other DNA
atggcaaacatctgcaatcaagcaaacgtctggtgctcta

SEQ ID NO: 7959 - DNA, 40 bp, synthetic construct
  source 1..40: mol_type = other DNA
gacagacttagactgatcactacgtacgcagcggcgttaa

SEQ ID NO: 7960 - DNA, 40 bp, synthetic construct
  source 1..40: mol_type = other DNA
actatgagcgcgcatactggttacaactgcgagaattgac

SEQ ID NO: 7961 - DNA, 40 bp, synthetic construct
  source 1..40: mol_type = other DNA
gtcctagcgctctgtctgttacataaagggagactgtaag

SEQ ID NO: 7962 - DNA, 40 bp, synthetic construct
  source 1..40: mol_type = other DNA
tacgcgcaattactacatggtaatcgagagcacttgtcag

SEQ ID NO: 7963 - DNA, 40 bp, synthetic construct
  source 1..40: mol_type = other DNA
atcttccttgccaacaacaggggacatgaccttttaaggg

SEQ ID NO: 7964 - DNA, 40 bp, synthetic construct
  source 1..40: mol_type = other DNA
tggcacctatccttgcacattccaaatatgagactgtgga

SEQ ID NO: 7965 - DNA, 40 bp, synthetic construct
  source 1..40: mol_type = other DNA
gcatctgtttccgcttccaggtcccagcggtagttgagtc

SEQ ID NO: 7966 - DNA, 40 bp, synthetic construct
  source 1..40: mol_type = other DNA
ctccctgcggaagcgcttgtaggaggttgccctcgtactc

SEQ ID NO: 7967 - DNA, 40 bp, synthetic construct
  source 1..40: mol_type = other DNA
ggatatacagctgtcttgggagacatccagactgtcgcat

SEQ ID NO: 7968 - DNA, 40 bp, synthetic construct
  source 1..40: mol_type = other DNA
cctcaacttgctttaacaactgagttctccatcttcagtg

SEQ ID NO: 7969 - DNA, 40 bp, synthetic construct
  source 1..40: mol_type = other DNA
ggtaggtagcaaagatgccgcatatccaagtgtccagagg

SEQ ID NO: 7970 - DNA, 40 bp, synthetic construct
  source 1..40: mol_type = other DNA
gtctttgtaaccctgagccgacacacaggtctaggtcgtg

SEQ ID NO: 7971 - DNA, 40 bp, synthetic construct
  source 1..40: mol_type = other DNA
ggtctgatcctcgctgacctctttggaatcaccactgacc

SEQ ID NO: 7972 - DNA, 40 bp, synthetic construct
  source 1..40: mol_type = other DNA
gatttcaggctctcaaacttcccagtacttgttgaagtcg

SEQ ID NO: 7973 - DNA, 40 bp, synthetic construct
  source 1..40: mol_type = other DNA
gtagaggagcttgtagatgcccaaagaggaggaattcctt

SEQ ID NO: 7974 - DNA, 40 bp, synthetic construct
  source 1..40: mol_type = other DNA
tcacacattccagaagaggattccttgagcacaatccagg

SEQ ID NO: 7975 - DNA, 40 bp, synthetic construct
  source 1..40: mol_type = other DNA
ctgttcttcagtggctgagctgaaggaagctttgatttgc

SEQ ID NO: 7976 - DNA, 40 bp, synthetic construct
  source 1..40: mol_type = other DNA
cattccagtgaaccagatgcaaaagtgctgtacttcttgg

SEQ ID NO: 7977 - DNA, 40 bp, synthetic construct
  source 1..40: mol_type = other DNA
tcatgtaggtggctttggtgaattcaacagggatggactg

SEQ ID NO: 7978 - DNA, 40 bp, synthetic construct
  source 1..40: mol_type = other DNA
cgaagaatgccaacacctcaattgggaacagccaaatcag

SEQ ID NO: 7979 - DNA, 40 bp, synthetic construct
  source 1..40: mol_type = other DNA
ggtccaaagttgcaaacaaaagggaagggaaacctcttga

SEQ ID NO: 7980 - DNA, 40 bp, synthetic construct
  source 1..40: mol_type = other DNA
ctggtgcttgagttcgccgctttgagttcgagtccgcttg

SEQ ID NO: 7981 - DNA, 40 bp, synthetic construct
  source 1..40: mol_type = other DNA
aaaagccctcgcagttctccactttcttctcagccgcatt

SEQ ID NO: 7982 - DNA, 40 bp, synthetic construct
  source 1..40: mol_type = other DNA
tgagtacccagttctttgggagaacagatctgctcagtgt

SEQ ID NO: 7983 - DNA, 40 bp, synthetic construct
  source 1..40: mol_type = other DNA
ttattctcttctgggtgtccttcacagtggaacacgatga

SEQ ID NO: 7984 - DNA, 40 bp, synthetic construct
  source 1..40: mol_type = other DNA
acggttggcagcgcacatacgatcttggtgtttccctgac

SEQ ID NO: 7985 - DNA, 40 bp, synthetic construct
  source 1..40: mol_type = other DNA
cgctcctggctgaccaatcaacacttgttgttccagacaa

SEQ ID NO: 7986 - DNA, 40 bp, synthetic construct
  source 1..40: mol_type = other DNA
cacgatccagtgagttacttgttgtaccaagcactgattt

SEQ ID NO: 7987 - DNA, 40 bp, synthetic construct
  source 1..40: mol_type = other DNA
aggattatcgttggtgtcaggtggtgggattgaagatcgg

SEQ ID NO: 7988 - DNA, 40 bp, synthetic construct
  source 1..40: mol_type = other DNA
gatgacacagcgtgagagaacctcaactgcattcccgttg

SEQ ID NO: 7989 - DNA, 40 bp, synthetic construct
  source 1..40: mol_type = other DNA
gtagcgactgtagtgaaactgctttcctccggatggtgat

SEQ ID NO: 7990 - DNA, 40 bp, synthetic construct
  source 1..40: mol_type = other DNA
aaattttaaaggctgcagcctcggcggcctccaggatcaa

SEQ ID NO: 7991 - DNA, 40 bp, synthetic construct
  source 1..40: mol_type = other DNA
tttgaagaaccaacggatgggaggacgggagactctggtt

SEQ ID NO: 7992 - DNA, 40 bp, synthetic construct
  source 1..40: mol_type = other DNA
agagaactccaagctaatcctgaaagaggtacctgagtat

SEQ ID NO: 7993 - DNA, 40 bp, synthetic construct
  source 1..40: mol_type = other DNA
tcgctcccgaaaggtaagacgtggcaggagaggttgaggt

SEQ ID NO: 7994 - DNA, 40 bp, synthetic construct
  source 1..40: mol_type = other DNA
tgggtttattacctatgggtgactttgtttgtagtacctg

SEQ ID NO: 7995 - DNA, 40 bp, synthetic construct
  source 1..40: mol_type = other DNA
tggaagagggtcatcaacaggatgtaagctgtatgtaacc

SEQ ID NO: 7996 - DNA, 40 bp, synthetic construct
  source 1..40: mol_type = other DNA
tgatggctcttccaccgcctttctccataacatccttgga

SEQ ID NO: 7997 - DNA, 40 bp, synthetic construct
  source 1..40: mol_type = other DNA
tgtgtgttcgattagctgcaagcgtgtctgtattcgtgcg

SEQ ID NO: 7998 - DNA, 40 bp, synthetic construct
  source 1..40: mol_type = other DNA
ttgtaccagacttggagaaatttggcttcactatccttcc

SEQ ID NO: 7999 - DNA, 40 bp, synthetic construct
  source 1..40: mol_type = other DNA
gtttttgtccactacaaagctggaggtaggccattttggt

SEQ ID NO: 8000 - DNA, 40 bp, synthetic construct
  source 1..40: mol_type = other DNA
acatagtcagcctttgtcttaggtctcaagttttggtctc

SEQ ID NO: 8001 - DNA, 40 bp, synthetic construct
  source 1..40: mol_type = other DNA
caggatttgcttgagggataaggtgtaggatcaatgtcat

SEQ ID NO: 8002 - DNA, 40 bp, synthetic construct
  source 1..40: mol_type = other DNA
ttcctggctcaaatgttggtccattgttcctctctagtta

SEQ ID NO: 8003 - DNA, 40 bp, synthetic construct
  source 1..40: mol_type = other DNA
agacaaacagaccacaccttgaaagtctagcactttgttc

SEQ ID NO: 8004 - DNA, 40 bp, synthetic construct
  source 1..40: mol_type = other DNA
caaagactttgcactggatcgctcagattcagcaaggagt

SEQ ID NO: 8005 - DNA, 40 bp, synthetic construct
  source 1..40: mol_type = other DNA
cgtagtccttgcggtcgtagccctgcgtctgtcccttaga

SEQ ID NO: 8006 - DNA, 40 bp, synthetic construct
  source 1..40: mol_type = other DNA
ttgagatggatctgttgacctgagtacccatgggaggtat

SEQ ID NO: 8007 - DNA, 40 bp, synthetic construct
  source 1..40: mol_type = other DNA
cagccaaaaagagacagaagccttggacatgatgcacctt

SEQ ID NO: 8008 - DNA, 40 bp, synthetic construct
  source 1..40: mol_type = other DNA
ttgtatttcctggtcaacctggtaggactttagcagctcg

SEQ ID NO: 8009 - DNA, 40 bp, synthetic construct
  source 1..40: mol_type = other DNA
gaggatatgctgcaggaagggagagatccgcatcttcgca

SEQ ID NO: 8010 - DNA, 40 bp, synthetic construct
  source 1..40: mol_type = other DNA
ctgcctcaaggcggccttgaacgtgagccgaggcgtttgt

SEQ ID NO: 8011 - DNA, 40 bp, synthetic construct
  source 1..40: mol_type = other DNA
atgcagggtacatggagaatttaaagtttgcagcactacc

SEQ ID NO: 8012 - DNA, 40 bp, synthetic construct
  source 1..40: mol_type = other DNA
gtcaactgtactgtgaggtttcttctgctttaacacggaa

SEQ ID NO: 8013 - DNA, 40 bp, synthetic construct
  source 1..40: mol_type = other DNA
caacattgtgtctgaccagggtcaccagaaccaagagtgc

SEQ ID NO: 8014 - DNA, 40 bp, synthetic construct
  source 1..40: mol_type = other DNA
tttccaggaaattctgagtgcttagcgatctgttcaccct

SEQ ID NO: 8015 - DNA, 40 bp, synthetic construct
  source 1..40: mol_type = other DNA
tgagcaactttgctctgtggtgaagacgtccatgttatcc

SEQ ID NO: 8016 - DNA, 40 bp, synthetic construct
  source 1..40: mol_type = other DNA
cgtaagtataggtcctcatttgtggtccacagtagttttt

SEQ ID NO: 8017 - DNA, 40 bp, synthetic construct
  source 1..40: mol_type = other DNA
ggtgaagtcctaaagcttgcacgttgacttggatctgtca

SEQ ID NO: 8018 - DNA, 40 bp, synthetic construct
  source 1..40: mol_type = other DNA
ggtcccaaaggctaggcatgggtggacgacgacgagaagc

SEQ ID NO: 8019 - DNA, 40 bp, synthetic construct
  source 1..40: mol_type = other DNA
gtgccggagcgtagaagccgcgtttgctgatgaactcaga

SEQ ID NO: 8020 - DNA, 40 bp, synthetic construct
  source 1..40: mol_type = other DNA
ggtttctatctaggaagctcactgaatcttgcactgcttt

SEQ ID NO: 8021 - DNA, 40 bp, synthetic construct
  source 1..40: mol_type = other DNA
gcatatctttaagctggttgagaacctctgaagttggcaa

SEQ ID NO: 8022 - DNA, 40 bp, synthetic construct
  source 1..40: mol_type = other DNA
caacaacgacttcttcaagtagttctgtcttcatagtggc

SEQ ID NO: 8023 - DNA, 40 bp, synthetic construct
  source 1..40: mol_type = other DNA
gagctcatcagaagagctggagcagctcaatgatccaact

SEQ ID NO: 8024 - DNA, 40 bp, synthetic construct
  source 1..40: mol_type = other DNA
gttctccaacagtctcagctttgcatgaagtcttgtaagc

SEQ ID NO: 8025 - DNA, 40 bp, synthetic construct
  source 1..40: mol_type = other DNA
actgaagtacactggcattgtgacagtattttgtgcacca

SEQ ID NO: 8026 - DNA, 40 bp, synthetic construct
  source 1..40: mol_type = other DNA
tcccacgcacacacatttgtgaccttcaaagatgtcttcg

SEQ ID NO: 8027 - DNA, 40 bp, synthetic construct
  source 1..40: mol_type = other DNA
acacgctcacccatgctctcgggcacagggccaagctttt

SEQ ID NO: 8028 - DNA, 40 bp, synthetic construct
  source 1..40: mol_type = other DNA
ataacgaggcggcagagggcgtggtgatattcacggccgc

SEQ ID NO: 8029 - DNA, 40 bp, synthetic construct
  source 1..40: mol_type = other DNA
gatcactttggacccagcggcccaccgtgaattcgttttg

SEQ ID NO: 8030 - DNA, 40 bp, synthetic construct
  source 1..40: mol_type = other DNA
gactgctggaatgacataccctgccagttctcttgaataa

SEQ ID NO: 8031 - DNA, 40 bp, synthetic construct
  source 1..40: mol_type = other DNA
agatgccaggtatgaacataaccttaatttaggacacacc

SEQ ID NO: 8032 - DNA, 40 bp, synthetic construct
  source 1..40: mol_type = other DNA
ccgcaggacagaattacttcaacgtgcatgatgctgaacc

SEQ ID NO: 8033 - DNA, 40 bp, synthetic construct
  source 1..40: mol_type = other DNA
cgatctcgacagtcgctccgtgttcacagaacatactagg

SEQ ID NO: 8034 - DNA, 40 bp, synthetic construct
  source 1..40: mol_type = other DNA
ctgggttcggttcctcgactcagaaagagaagccttttgg

SEQ ID NO: 8035 - DNA, 40 bp, synthetic construct
  source 1..40: mol_type = other DNA
ggccaaaactccaaaacacactgtgtcattcaactcaact

SEQ ID NO: 8036 - DNA, 40 bp, synthetic construct
  source 1..40: mol_type = other DNA
ccttccgaactgacggtttcctcccacatgttctaaccag

SEQ ID NO: 8037 - DNA, 40 bp, synthetic construct
  source 1..40: mol_type = other DNA
ccctcattccagcacacaagctcagtgttacatccggtga

SEQ ID NO: 8038 - DNA, 40 bp, synthetic construct
  source 1..40: mol_type = other DNA
cgagagaagatgttgtccgaagctccagacgtctgactgg

SEQ ID NO: 8039 - DNA, 40 bp, synthetic construct
  source 1..40: mol_type = other DNA
ttgtcaagcggcagcagcttcgcggaccacgtagtagtct

SEQ ID NO: 8040 - DNA, 40 bp, synthetic construct
  source 1..40: mol_type = other DNA
gtccgcgggaagtagccaccccgcaggcactgaaagcccg

SEQ ID NO: 8041 - DNA, 40 bp, synthetic construct
  source 1..40: mol_type = other DNA
gttgaacctcagttccttttggtgcgtctcagctccgtta

SEQ ID NO: 8042 - DNA, 40 bp, synthetic construct
  source 1..40: mol_type = other DNA
ggctgctgtaacgggccttgcgactggaggttggctaact

SEQ ID NO: 8043 - DNA, 40 bp, synthetic construct
  source 1..40: mol_type = other DNA
tggtgtattttgttcagggccaaaggcatagtctggtatg

SEQ ID NO: 8044 - DNA, 40 bp, synthetic construct
  source 1..40: mol_type = other DNA
gggatttctgttaacgcattaacttctaaaagcctggacg

SEQ ID NO: 8045 - DNA, 40 bp, synthetic construct
  source 1..40: mol_type = other DNA
tagcggctattgatctgaaattttgccatcattacaccag

SEQ ID NO: 8046 - DNA, 40 bp, synthetic construct
  source 1..40: mol_type = other DNA
tgtgaacttcgcccacaggcgtggcctgtactaaattgac

SEQ ID NO: 8047 - DNA, 40 bp, synthetic construct
  source 1..40: mol_type = other DNA
cttgttttcctgatggttgaatggatttctgaacctgact

SEQ ID NO: 8048 - DNA, 40 bp, synthetic construct
  source 1..40: mol_type = other DNA
ttcttttgccctttattccgtctgccatacactcagggat

SEQ ID NO: 8049 - DNA, 40 bp, synthetic construct
  source 1..40: mol_type = other DNA
tatccttcggcagccttctgccacatagtagaactgggta

SEQ ID NO: 8050 - DNA, 40 bp, synthetic construct
  source 1..40: mol_type = other DNA
cccttcaaaacgacatccattatactgaggaagattgtcg

SEQ ID NO: 8051 - DNA, 40 bp, synthetic construct
  source 1..40: mol_type = other DNA
ctggaaagatgtccagctgcaggatggtaggtatcccggg

SEQ ID NO: 8052 - DNA, 40 bp, synthetic construct
  source 1..40: mol_type = other DNA
aaccagaacacagaccagcaagatagacaatggccagcgc

SEQ ID NO: 8053 - DNA, 40 bp, synthetic construct
  source 1..40: mol_type = other DNA
acgctggatcaccacacggtgccacgtggtgaccctcatc

SEQ ID NO: 8054 - DNA, 40 bp, synthetic construct
  source 1..40: mol_type = other DNA
gggaggagttggtacacacgctccggcctgcagacgactt

SEQ ID NO: 8055 - DNA, 40 bp, synthetic construct
  source 1..40: mol_type = other DNA
cacctgctcacggttcctgcaagcacatcttgaacttccc

SEQ ID NO: 8056 - DNA, 40 bp, synthetic construct
  source 1..40: mol_type = other DNA
gtcgtagcagccacactgggtcatagtagtttccgtcctt

SEQ ID NO: 8057 - DNA, 40 bp, synthetic construct
  source 1..40: mol_type = other DNA
tcgctcacagtgacgacggaccttgactgagatgatggct

SEQ ID NO: 8058 - DNA, 40 bp, synthetic construct
  source 1..40: mol_type = other DNA
gtaggtgttttgtttgtgctaagtgtgtgaatgtagcgag

SEQ ID NO: 8059 - DNA, 40 bp, synthetic construct
  source 1..40: mol_type = other DNA
taagttgaacagccattgcgcttccagatacttagcgatt

SEQ ID NO: 8060 - DNA, 40 bp, synthetic construct
  source 1..40: mol_type = other DNA
ggtaccagcatcacatctcacagtacagatcgattccagt

SEQ ID NO: 8061 - DNA, 40 bp, synthetic construct
  source 1..40: mol_type = other DNA
ccgctatgcgcagcgtttgacagcgcgtacaagctgtggt

SEQ ID NO: 8062 - DNA, 40 bp, synthetic construct
  source 1..40: mol_type = other DNA
aaagtgcacgaggagaaggccgggagggcaatggctccga

SEQ ID NO: 8063 - DNA, 40 bp, synthetic construct
  source 1..40: mol_type = other DNA
gatactgtacctgattagcttatggtgtagatgacaggat

SEQ ID NO: 8064 - DNA, 40 bp, synthetic construct
  source 1..40: mol_type = other DNA
aggtagataacactacctctcctgtcaaaaagcctgacaa

SEQ ID NO: 8065 - DNA, 40 bp, synthetic construct
  source 1..40: mol_type = other DNA
ctggctttgaaagtgagtgagcacttcctctttccttcag

SEQ ID NO: 8066 - DNA, 40 bp, synthetic construct
  source 1..40: mol_type = other DNA
catcttccaagagggaacatctgcaaacatttagcagagt

SEQ ID NO: 8067 - DNA, 40 bp, synthetic construct
  source 1..40: mol_type = other DNA
gtccaacgctgggttgattagagtctgacggaaagtattt

SEQ ID NO: 8068 - DNA, 40 bp, synthetic construct
  source 1..40: mol_type = other DNA
gctttggaatcatcagtggctcacactgagacgacagact

SEQ ID NO: 8069 - DNA, 40 bp, synthetic construct
  source 1..40: mol_type = other DNA
agagccacgatttctcggcgactctttcagcttggtcttc

SEQ ID NO: 8070 - DNA, 40 bp, synthetic construct
  source 1..40: mol_type = other DNA
tggatgaggactagtcattggaagaattagtggtgctaca

SEQ ID NO: 8071 - DNA, 40 bp, synthetic construct
  source 1..40: mol_type = other DNA
acggaattacagagaaagagagggaggaaaaagcgaaaac

SEQ ID NO: 8072 - DNA, 40 bp, synthetic construct
  source 1..40: mol_type = other DNA
ccggcagattgagagtctgtctcagaaccggttcttacca

SEQ ID NO: 8073 - DNA, 40 bp, synthetic construct
  source 1..40: mol_type = other DNA
agggtgcttttgaggaacatgggaaggagacttgacgtca

SEQ ID NO: 8074 - DNA, 40 bp, synthetic construct
  source 1..40: mol_type = other DNA
ggctgtgcgtgccacggtagggaggcacccgactcggtga

SEQ ID NO: 8075 - DNA, 40 bp, synthetic construct
  source 1..40: mol_type = other DNA
cccaaatggaattcccgatcctcaatcaagttcagtttgc

SEQ ID NO: 8076 - DNA, 40 bp, synthetic construct
  source 1..40: mol_type = other DNA
ccatctggagttcttcccgagaaagctaggagtgtttgtc

SEQ ID NO: 8077 - DNA, 40 bp, synthetic construct
  source 1..40: mol_type = other DNA
catacacgaagagcttctggcgagggaggattgttcgggt

SEQ ID NO: 8078 - DNA, 40 bp, synthetic construct
  source 1..40: mol_type = other DNA
tggcataaactgtagtcactttggagaacagacccattgt

SEQ ID NO: 8079 - DNA, 40 bp, synthetic construct
  source 1..40: mol_type = other DNA
ggcttctttaatgtgagaccctctttgaagccgacagttt

SEQ ID NO: 8080 - DNA, 40 bp, synthetic construct
  source 1..40: mol_type = other DNA
cttctacatggattctaccatttcccagaaaagtccatga

SEQ ID NO: 8081 - DNA, 40 bp, synthetic construct
  source 1..40: mol_type = other DNA
actgctgctttggagttatttaaaactggaggcggagttc

SEQ ID NO: 8082 - DNA, 40 bp, synthetic construct
  source 1..40: mol_type = other DNA
acagcaagaagtcttttctccacggatgagttggagaata

SEQ ID NO: 8083 - DNA, 40 bp, synthetic construct
  source 1..40: mol_type = other DNA
tatctgccagtttccgactctcgcaagtccttgaaattgc

SEQ ID NO: 8084 - DNA, 40 bp, synthetic construct
  source 1..40: mol_type = other DNA
tccaacgcctctttggtctctcaaggtgctgttcatgttc

SEQ ID NO: 8085 - DNA, 40 bp, synthetic construct
  source 1..40: mol_type = other DNA
acttgatgatcagcttggccgtcgccgatggaggtgacca

SEQ ID NO: 8086 - DNA, 40 bp, synthetic construct
  source 1..40: mol_type = other DNA
cagccaacttcatcctgaccaaaaccaagctaagctgtgt

SEQ ID NO: 8087 - DNA, 40 bp, synthetic construct
  source 1..40: mol_type = other DNA
cccgccacatttagtctcggtggcagcagattaaagacaa

SEQ ID NO: 8088 - DNA, 40 bp, synthetic construct
  source 1..40: mol_type = other DNA
gcaatcttgcgggtggcaaatcgtctgagtgagacgtact

SEQ ID NO: 8089 - DNA, 40 bp, synthetic construct
  source 1..40: mol_type = other DNA
ggcacatccttccatttctgaggagaacttgtcttcacaa

SEQ ID NO: 8090 - DNA, 40 bp, synthetic construct
  source 1..40: mol_type = other DNA
atgtactctgctatggtgctggcttctctgatagccactt

SEQ ID NO: 8091 - DNA, 40 bp, synthetic construct
  source 1..40: mol_type = other DNA
ggagaataccttcatagcctatcctgggctttctaaggcg

SEQ ID NO: 8092 - DNA, 40 bp, synthetic construct
  source 1..40: mol_type = other DNA
attgggctggctgttggcagggtgcatttctggattcgac

SEQ ID NO: 8093 - DNA, 40 bp, synthetic construct
  source 1..40: mol_type = other DNA
caacacggcagaatggtatactcatgaggtcactgatacc

SEQ ID NO: 8094 - DNA, 40 bp, synthetic construct
  source 1..40: mol_type = other DNA
ccagaatatcgacgcaaaagatcagtcctcgtttcttgag

SEQ ID NO: 8095 - DNA, 40 bp, synthetic construct
  source 1..40: mol_type = other DNA
taggtatacacaggactgacggcaccaactgactaatatc

SEQ ID NO: 8096 - DNA, 40 bp, synthetic construct
  source 1..40: mol_type = other DNA
aggactgatcgtaggaccacaatggatcccaggtattggt

SEQ ID NO: 8097 - DNA, 40 bp, synthetic construct
  source 1..40: mol_type = other DNA
ggtgggtttgtgaagacagttgtggtaggtggcgacttgc

SEQ ID NO: 8098 - DNA, 40 bp, synthetic construct
  source 1..40: mol_type = other DNA
tagattcagacccaccttccctctagttccgtcatggtgc

SEQ ID NO: 8099 - DNA, 40 bp, synthetic construct
  source 1..40: mol_type = other DNA
gataggaaagcccagggtcagggagctgagtctttgggag

SEQ ID NO: 8100 - DNA, 40 bp, synthetic construct
  source 1..40: mol_type = other DNA
tgaagacccggcctcggagacagccgccggatgggaatgt

SEQ ID NO: 8101 - DNA, 40 bp, synthetic construct
  source 1..40: mol_type = other DNA
catagacacagaatccaacaggcaaatccaaagaatcccg

SEQ ID NO: 8102 - DNA, 40 bp, synthetic construct
  source 1..40: mol_type = other DNA
aagaaacaccaaaggtgcaatgactcttcccataactact

SEQ ID NO: 8103 - DNA, 40 bp, synthetic construct
  source 1..40: mol_type = other DNA
aagaaggaagtcaggagcctgtcggagaagttgagccggc

SEQ ID NO: 8104 - DNA, 40 bp, synthetic construct
  source 1..40: mol_type = other DNA
aagtctttgttggattcgagggtatgagctagtcaacagc

SEQ ID NO: 8105 - DNA, 40 bp, synthetic construct
  source 1..40: mol_type = other DNA
gtggcgcccttcagcgtcagagaggaagacgatgccattg

SEQ ID NO: 8106 - DNA, 40 bp, synthetic construct
  source 1..40: mol_type = other DNA
gccgatcatgaactcgatgtcagaagatgttgggcttgtg

SEQ ID NO: 8107 - DNA, 40 bp, synthetic construct
  source 1..40: mol_type = other DNA
cccaggtgatagttcccgaaggatgatccaggacatgacg

SEQ ID NO: 8108 - DNA, 40 bp, synthetic construct
  source 1..40: mol_type = other DNA
cgggcatcaggaccaggacatggctctgtctcctagacaa

SEQ ID NO: 8109 - DNA, 40 bp, synthetic construct
  source 1..40: mol_type = other DNA
atgaaaacaacttctggaggacagtgattgccattcggga

SEQ ID NO: 8110 - DNA, 40 bp, synthetic construct
  source 1..40: mol_type = other DNA
aactcatgctttttggcacccgtccagaacgctggtcaga

SEQ ID NO: 8111 - DNA, 40 bp, synthetic construct
  source 1..40: mol_type = other DNA
ggcggacggccatgctgatcggccagggcgattacccact

SEQ ID NO: 8112 - DNA, 40 bp, synthetic construct
  source 1..40: mol_type = other DNA
tcgctgaagacttggaggatcagtttctaatgcaagggtc

SEQ ID NO: 8113 - DNA, 40 bp, synthetic construct
  source 1..40: mol_type = other DNA
cactgctggcttttcgagagcacagtcgtccttcccattg

SEQ ID NO: 8114 - DNA, 40 bp, synthetic construct
  source 1..40: mol_type = other DNA
tgttttccagggtcctccgaatttcagtctcagacccgtc

SEQ ID NO: 8115 - DNA, 40 bp, synthetic construct
  source 1..40: mol_type = other DNA
gtagcaaataggcctttacagcccattttgcctttgtctg

SEQ ID NO: 8116 - DNA, 40 bp, synthetic construct
  source 1..40: mol_type = other DNA
tgctgctaagtccttacactcgctgtttttttacatccgc

SEQ ID NO: 8117 - DNA, 40 bp, synthetic construct
  source 1..40: mol_type = other DNA
gcatttcttaggcgagccagttgaggccaaagcgagcacg

SEQ ID NO: 8118 - DNA, 40 bp, synthetic construct
  source 1..40: mol_type = other DNA
ccatccttgagttctctgggacagtgactcttgtccatta

SEQ ID NO: 8119 - DNA, 40 bp, synthetic construct
  source 1..40: mol_type = other DNA
cgttaagacatcaggctccatggagcatgggacctttatt

SEQ ID NO: 8120 - DNA, 40 bp, synthetic construct
  source 1..40: mol_type = other DNA
ttagtgtttgtccggaacaatttggatttccctttagggc

SEQ ID NO: 8121 - DNA, 40 bp, synthetic construct
  source 1..40: mol_type = other DNA
caaacctcacattctgcagcttctggtgtggttccaaaga

SEQ ID NO: 8122 - DNA, 40 bp, synthetic construct
  source 1..40: mol_type = other DNA
tggcaccactgatgttacagtgactccatcaaatcggaac

SEQ ID NO: 8123 - DNA, 40 bp, synthetic construct
  source 1..40: mol_type = other DNA
acgaagaaatacctgaagctcattgcagacacatctccaa

SEQ ID NO: 8124 - DNA, 40 bp, synthetic construct
  source 1..40: mol_type = other DNA
tttgttgtccgcagcattaagacatttttgggtccctttg

SEQ ID NO: 8125 - DNA, 40 bp, synthetic construct
  source 1..40: mol_type = other DNA
gggctcaagaaccctgaaagccatggtgacggtcgtgaag

SEQ ID NO: 8126 - DNA, 40 bp, synthetic construct
  source 1..40: mol_type = other DNA
tgagctcttggaatacggttatgggttgggtagagtttgt

SEQ ID NO: 8127 - DNA, 40 bp, synthetic construct
  source 1..40: mol_type = other DNA
cgacgtttacggtagacattccaagtccgcaaaatacttt

SEQ ID NO: 8128 - DNA, 40 bp, synthetic construct
  source 1..40: mol_type = other DNA
ttatagcaccgcagcatcccaagcatgcagcgactttctt

SEQ ID NO: 8129 - DNA, 40 bp, synthetic construct
  source 1..40: mol_type = other DNA
acttgcctgcagagatttctctgcaatatgctctggagca

SEQ ID NO: 8130 - DNA, 40 bp, synthetic construct
  source 1..40: mol_type = other DNA
gtatttcatttctgcacccagtgtaatgtgaagctctccc

SEQ ID NO: 8131 - DNA, 40 bp, synthetic construct
  source 1..40: mol_type = other DNA
gtcacagatcactcgtgcccctcaccaaaccagggatatt

SEQ ID NO: 8132 - DNA, 40 bp, synthetic construct
  source 1..40: mol_type = other DNA
agatgcgttgtccgctgtgctgcatgactctcccaaagac

SEQ ID NO: 8133 - DNA, 40 bp, synthetic construct
  source 1..40: mol_type = other DNA
tgtggaaactcagcggataaaaacagaaatggagagtcag

SEQ ID NO: 8134 - DNA, 40 bp, synthetic construct
  source 1..40: mol_type = other DNA
gtgcaaagaggacacttgtagtttccgacgagtttcataa

SEQ ID NO: 8135 - DNA, 40 bp, synthetic construct
  source 1..40: mol_type = other DNA
tggattgtctgcatccataatcataagaagtggttgtgca

SEQ ID NO: 8136 - DNA, 40 bp, synthetic construct
  source 1..40: mol_type = other DNA
gagaacttctcatgcttgccgcagccgcttaagcacctcc

SEQ ID NO: 8137 - DNA, 40 bp, synthetic construct
  source 1..40: mol_type = other DNA
aacttggtgtcctttttgactagggaggaagaaatcccga

SEQ ID NO: 8138 - DNA, 40 bp, synthetic construct
  source 1..40: mol_type = other DNA
gcccttggaacagacctgcttgagcccacctgacgcaaag

SEQ ID NO: 8139 - DNA, 40 bp, synthetic construct
  source 1..40: mol_type = other DNA
atttcaatgatggctgcttcctgatgtcctgcccgataag

SEQ ID NO: 8140 - DNA, 40 bp, synthetic construct
  source 1..40: mol_type = other DNA
ttctcgaagtttccactcagccagaagggccaacgctgtc

SEQ ID NO: 8141 - DNA, 40 bp, synthetic construct
  source 1..40: mol_type = other DNA
cacctttcaactccaggtcctgtgaggcatttctcaatgt

SEQ ID NO: 8142 - DNA, 40 bp, synthetic construct
  source 1..40: mol_type = other DNA
cttcattcacaccaaagtccggcatctgaatcagccaagt

SEQ ID NO: 8143 - DNA, 40 bp, synthetic construct
  source 1..40: mol_type = other DNA
cactgaaaggctagaagaggactgaaagagatgaaggtag

SEQ ID NO: 8144 - DNA, 40 bp, synthetic construct
  source 1..40: mol_type = other DNA
gaccacgtgctgttgctttcgatggccaaatctttgatag

SEQ ID NO: 8145 - DNA, 40 bp, synthetic construct
  source 1..40: mol_type = other DNA
ccgtcttgacggttctgaattcctgccaaagtcaacacta

SEQ ID NO: 8146 - DNA, 40 bp, synthetic construct
  source 1..40: mol_type = other DNA
ttgtcctcttggaatctctgtggtgaagacttgatgcaga

SEQ ID NO: 8147 - DNA, 40 bp, synthetic construct
  source 1..40: mol_type = other DNA
attctagcaggcaggcctccttttgcatcctcacattagg

SEQ ID NO: 8148 - DNA, 40 bp, synthetic construct
  source 1..40: mol_type = other DNA
gcgccacgactgcagggtctctaagtctgtggtagaagcg

SEQ ID NO: 8149 - DNA, 40 bp, synthetic construct
  source 1..40: mol_type = other DNA
gcagcaaatcttcatcgctgctcttgaatcagcaagtccc

SEQ ID NO: 8150 - DNA, 40 bp, synthetic construct
  source 1..40: mol_type = other DNA
gagttgaggtttacagaaagacaccatagctcttcttcac

SEQ ID NO: 8151 - DNA, 40 bp, synthetic construct
  source 1..40: mol_type = other DNA
cccaagcttcagccttatcacaccgtttctaggacgatgc

SEQ ID NO: 8152 - DNA, 40 bp, synthetic construct
  source 1..40: mol_type = other DNA
gcgaagccacattctcaatcccgggtggttgtgcctcaga

SEQ ID NO: 8153 - DNA, 40 bp, synthetic construct
  source 1..40: mol_type = other DNA
tgttcaggatctcctcattcaggacggacatacttgagac

SEQ ID NO: 8154 - DNA, 40 bp, synthetic construct
  source 1..40: mol_type = other DNA
atctccgttaacgaaattgctactgctgccaacttaagtc

SEQ ID NO: 8155 - DNA, 40 bp, synthetic construct
  source 1..40: mol_type = other DNA
ccgaacataggagtggtcagtttagctaacttgcttgggt

SEQ ID NO: 8156 - DNA, 40 bp, synthetic construct
  source 1..40: mol_type = other DNA
gggtctaagtttggtctcccgagttctctagtccacagcg

SEQ ID NO: 8157 - DNA, 40 bp, synthetic construct
  source 1..40: mol_type = other DNA
caaaggagatcatgtgacattcttagaagattccagaccc

SEQ ID NO: 8158 - DNA, 40 bp, synthetic construct
  source 1..40: mol_type = other DNA
gtgagagggaagcagtggcaactgtgatatccattcgctt

SEQ ID NO: 8159 - DNA, 40 bp, synthetic construct
  source 1..40: mol_type = other DNA
gaacatcgtatttgtctgagtttcccaatcttgtcatggg

SEQ ID NO: 8160 - DNA, 40 bp, synthetic construct
  source 1..40: mol_type = other DNA
gttgctacagaggatgggaaagttcttctggaaagttcgg

SEQ ID NO: 8161 - DNA, 40 bp, synthetic construct
  source 1..40: mol_type = other DNA
cacccggctcatctccgccatcgtcaaggatgcgtatgga

SEQ ID NO: 8162 - DNA, 40 bp, synthetic construct
  source 1..40: mol_type = other DNA
cctgttctgatccagggagaagccactgtagttaagagct

SEQ ID NO: 8163 - DNA, 40 bp, synthetic construct
  source 1..40: mol_type = other DNA
ttctccagcatcttccttacttggatgcatggcactcata

SEQ ID NO: 8164 - DNA, 40 bp, synthetic construct
  source 1..40: mol_type = other DNA
ttgtgctgatgtgtggagactggagggaggcgctgcgtag

SEQ ID NO: 8165 - DNA, 40 bp, synthetic construct
  source 1..40: mol_type = other DNA
ggcagtttacattatggctaatgcccaaagtccaatttga

SEQ ID NO: 8166 - DNA, 40 bp, synthetic construct
  source 1..40: mol_type = other DNA
gaaagcccgaagcgaagcgaagggcaggaacgaaaatggg

SEQ ID NO: 8167 - DNA, 40 bp, synthetic construct
  source 1..40: mol_type = other DNA
acttattagtatcggcgacgttgagaaactagacactgca

SEQ ID NO: 8168 - DNA, 40 bp, synthetic construct
  source 1..40: mol_type = other DNA
cgatgtggtctgtcttgtcggatgactgaaaggcaggcgt

SEQ ID NO: 8169 - DNA, 40 bp, synthetic construct
  source 1..40: mol_type = other DNA
attcacagttggtgcatgatcctctgcgcaagcggcagct

SEQ ID NO: 8170 - DNA, 40 bp, synthetic construct
  source 1..40: mol_type = other DNA
agatgctgtccctaccgtcccttgccttagcaaaaaatgc

SEQ ID NO: 8171 - DNA, 40 bp, synthetic construct
  source 1..40: mol_type = other DNA
agctcggtcaataaactgtctgctctctgatcagggctcg

SEQ ID NO: 8172 - DNA, 40 bp, synthetic construct
  source 1..40: mol_type = other DNA
ccgctggaaatgttgtcctcaagaactaacactggagcgt

SEQ ID NO: 8173 - DNA, 40 bp, synthetic construct
  source 1..40: mol_type = other DNA
aaagccagatgctgaagacctctcttcttgcggtgtcgat

SEQ ID NO: 8174 - DNA, 40 bp, synthetic construct
  source 1..40: mol_type = other DNA
aggatgctccacaatccgcgttagagacgatgacatcgga

SEQ ID NO: 8175 - DNA, 40 bp, synthetic construct
  source 1..40: mol_type = other DNA
tgccagcgtttggttggctgagtaacgctgtaccatccac

SEQ ID NO: 8176 - DNA, 40 bp, synthetic construct
  source 1..40: mol_type = other DNA
catcccttcttctaaggcttggtacagatgatgtttgagt

SEQ ID NO: 8177 - DNA, 40 bp, synthetic construct
  source 1..40: mol_type = other DNA
ttctacgtctagtctctgcttagctctttccgtcgtgctt

SEQ ID NO: 8178 - DNA, 40 bp, synthetic construct
  source 1..40: mol_type = other DNA
gtaggtgttctgagcagattttttagttacttccggaggt

SEQ ID NO: 8179 - DNA, 40 bp, synthetic construct
  source 1..40: mol_type = other DNA
tacacagtgaaaggctggtagtggatttatatacacacgg

SEQ ID NO: 8180 - DNA, 40 bp, synthetic construct
  source 1..40: mol_type = other DNA
atttccttccactcggataatccaaatactccacacgcaa

SEQ ID NO: 8181 - DNA, 40 bp, synthetic construct
  source 1..40: mol_type = other DNA
ggacagcatcaaatcatccacattgttcaatatcgtccgg

SEQ ID NO: 8182 - DNA, 40 bp, synthetic construct
  source 1..40: mol_type = other DNA
aagacaaagatggcaagacacaaacaaacccaatggcaac

SEQ ID NO: 8183 - DNA, 40 bp, synthetic construct
  source 1..40: mol_type = other DNA
aggttgacaggtgggaagagggcagtgtagactttaattc

SEQ ID NO: 8184 - DNA, 40 bp, synthetic construct
  source 1..40: mol_type = other DNA
ggctaggaatgatttggaaaaggtaacgagtcagagcttt

SEQ ID NO: 8185 - DNA, 40 bp, synthetic construct
  source 1..40: mol_type = other DNA
cctgaaatcttgacctcagtagcatcacaggaccattaat

SEQ ID NO: 8186 - DNA, 40 bp, synthetic construct
  source 1..40: mol_type = other DNA
gctcaaacacagcattaagatctctgggaaactcatgaaa

SEQ ID NO: 8187 - DNA, 40 bp, synthetic construct
  source 1..40: mol_type = other DNA
tcagattgcagtgggaagaatccaggcatgcagtaaactg

SEQ ID NO: 8188 - DNA, 40 bp, synthetic construct
  source 1..40: mol_type = other DNA
attattcaccgtggcagtcatgctgcttctgaagaactga

SEQ ID NO: 8189 - DNA, 40 bp, synthetic construct
  source 1..40: mol_type = other DNA
atccaagtaaccaccttggggccagcagtaatcgaataac

SEQ ID NO: 8190 - DNA, 40 bp, synthetic construct
  source 1..40: mol_type = other DNA
tggtcaggctgtaggcacctttgcaggctttttgtatagc

SEQ ID NO: 8191 - DNA, 40 bp, synthetic construct
  source 1..40: mol_type = other DNA
ctacctggctgtctgtcgattagggaacagaaagttccaa

SEQ ID NO: 8192 - DNA, 40 bp, synthetic construct
  source 1..40: mol_type = other DNA
ctcattaggtcaaggctgactgggctgcaactatagctac

SEQ ID NO: 8193 - DNA, 40 bp, synthetic construct
  source 1..40: mol_type = other DNA
cctgtgagttgtcccggatggagcaccgtgactgcgttca

SEQ ID NO: 8194 - DNA, 40 bp, synthetic construct
  source 1..40: mol_type = other DNA
tcatagcgtaccttctgtgcatgttagcgcgtagctaccc

SEQ ID NO: 8195 - DNA, 40 bp, synthetic construct
  source 1..40: mol_type = other DNA
gcagccgttttgcaaattgtcttgaccaataggttgacct

SEQ ID NO: 8196 - DNA, 40 bp, synthetic construct
  source 1..40: mol_type = other DNA
cccatagggtcagattgctccccaggaactgtgtcctaga

SEQ ID NO: 8197 - DNA, 40 bp, synthetic construct
  source 1..40: mol_type = other DNA
tgtctatgagtttcaggctgcaaaactgcagccagatcag

SEQ ID NO: 8198 - DNA, 40 bp, synthetic construct
  source 1..40: mol_type = other DNA
ttcaattctgcgctccaggtgcgatctcctcgttgagaga

SEQ ID NO: 8199 - DNA, 40 bp, synthetic construct
  source 1..40: mol_type = other DNA
gttcgtggacagtgtatttaaatgtttctggacacacagc

SEQ ID NO: 8200 - DNA, 40 bp, synthetic construct
  source 1..40: mol_type = other DNA
ttgcaggtcgctgcaaaagtcaatgtggtcgtggagtttc

SEQ ID NO: 8201 - DNA, 40 bp, synthetic construct
  source 1..40: mol_type = other DNA
cattgtctgtcagaaccttctgggcatgcaggcgtagttc

SEQ ID NO: 8202 - DNA, 40 bp, synthetic construct
  source 1..40: mol_type = other DNA
ttttatacactgggttgccctctgcctacacgtttatgag

SEQ ID NO: 8203 - DNA, 40 bp, synthetic construct
  source 1..40: mol_type = other DNA
gtctccacgtaagattacctgctccctctttggttgacct

SEQ ID NO: 8204 - DNA, 40 bp, synthetic construct
  source 1..40: mol_type = other DNA
aattggacgaggaagctcatggcgaccagcataaatactg

SEQ ID NO: 8205 - DNA, 40 bp, synthetic construct
  source 1..40: mol_type = other DNA
tgagatggtagccacggccaacagcgcgttccctcctcgt

SEQ ID NO: 8206 - DNA, 40 bp, synthetic construct
  source 1..40: mol_type = other DNA
gggcactcgaaggccaggcacggagcggcggtagttctca

SEQ ID NO: 8207 - DNA, 40 bp, synthetic construct
  source 1..40: mol_type = other DNA
cccatttccacttgcacatttggccatttctgcaaagatt

SEQ ID NO: 8208 - DNA, 40 bp, synthetic construct
  source 1..40: mol_type = other DNA
ggtagccgggcttacagtcactgtcctgtggaggtgaagc

SEQ ID NO: 8209 - DNA, 40 bp, synthetic construct
  source 1..40: mol_type = other DNA
acgtactacctggccaaagctccatgccaaaggcctctgc

SEQ ID NO: 8210 - DNA, 40 bp, synthetic construct
  source 1..40: mol_type = other DNA
aataaggctcagagccgtctcccttagccgcttccagaga

SEQ ID NO: 8211 - DNA, 40 bp, synthetic construct
  source 1..40: mol_type = other DNA
ggctcaaactcagttgtcacagtcagcagcatcaaagcat

SEQ ID NO: 8212 - DNA, 40 bp, synthetic construct
  source 1..40: mol_type = other DNA
gcttaggagctgttgtccacaagctcatcagccattgtgg

SEQ ID NO: 8213 - DNA, 40 bp, synthetic construct
  source 1..40: mol_type = other DNA
agctctcgagcactccgggccagtagaccagcttcatgac

SEQ ID NO: 8214 - DNA, 40 bp, synthetic construct
  source 1..40: mol_type = other DNA
ggtgaggctatcgctttcctctcagggcttgtttcaaata

SEQ ID NO: 8215 - DNA, 40 bp, synthetic construct
  source 1..40: mol_type = other DNA
ttccggagttgtttacactcttactaaggagctagcgaca

SEQ ID NO: 8216 - DNA, 40 bp, synthetic construct
  source 1..40: mol_type = other DNA
gaggatatttcgtgccgccaaccacgttcttctccgataa

SEQ ID NO: 8217 - DNA, 40 bp, synthetic construct
  source 1..40: mol_type = other DNA
tgaaaacgtgggtctctgaccccaaatgttccaccaactc

SEQ ID NO: 8218 - DNA, 40 bp, synthetic construct
  source 1..40: mol_type = other DNA
gcggtgcgcctgtttccgctctggtgagcctgctggcacg

SEQ ID NO: 8219 - DNA, 40 bp, synthetic construct
  source 1..40: mol_type = other DNA
gtaagtgcctgagaggacagcagctcctaggctttacgtg

SEQ ID NO: 8220 - DNA, 40 bp, synthetic construct
  source 1..40: mol_type = other DNA
aagtgaggaagttgcctgtgtttgtcaatagcttgggtca

SEQ ID NO: 8221 - DNA, 40 bp, synthetic construct
  source 1..40: mol_type = other DNA
ggttctctcttgtacagggcccacaatgacattggagtct

SEQ ID NO: 8222 - DNA, 40 bp, synthetic construct
  source 1..40: mol_type = other DNA
tccctagaacagaagatcactctgcaaatgagacactttc

SEQ ID NO: 8223 - DNA, 40 bp, synthetic construct
  source 1..40: mol_type = other DNA
gtcgttggcgcactcgtctaccgtggctgccacacatggt

SEQ ID NO: 8224 - DNA, 40 bp, synthetic construct
  source 1..40: mol_type = other DNA
gatgaaggtcaggtttaccaagccgattgtgctggagatg

SEQ ID NO: 8225 - DNA, 40 bp, synthetic construct
  source 1..40: mol_type = other DNA
gggatgacacattgaaagaaggacagatccagctcaacca

SEQ ID NO: 8226 - DNA, 40 bp, synthetic construct
  source 1..40: mol_type = other DNA
ctagtccggatggagagttcgagaggcagatgctcaataa

SEQ ID NO: 8227 - DNA, 40 bp, synthetic construct
  source 1..40: mol_type = other DNA
cttggactcttctgggttttacggtagttttgcttggact

SEQ ID NO: 8228 - DNA, 40 bp, synthetic construct
  source 1..40: mol_type = other DNA
gggtccaagctattttgcttgaccagttctcaacttgaag

SEQ ID NO: 8229 - DNA, 40 bp, synthetic construct
  source 1..40: mol_type = other DNA
agctctcatttccaaggagactcacttaaagtcaaggtgc

SEQ ID NO: 8230 - DNA, 40 bp, synthetic construct
  source 1..40: mol_type = other DNA
cataggaccgtatttcggcggtaagtaaagtgccaccagc

SEQ ID NO: 8231 - DNA, 40 bp, synthetic construct
  source 1..40: mol_type = other DNA
ttggcaaatctggcgtgtaaggcatggtccacatctgctc

SEQ ID NO: 8232 - DNA, 40 bp, synthetic construct
  source 1..40: mol_type = other DNA
tctggcctatatgaatccatctggaaaagatctttgcaac

SEQ ID NO: 8233 - DNA, 40 bp, synthetic construct
  source 1..40: mol_type = other DNA
tggttggtgtgtatcaaactcagctgtatgactttcagcc

SEQ ID NO: 8234 - DNA, 40 bp, synthetic construct
  source 1..40: mol_type = other DNA
ccagtaaaaggatgtctgcagcttgatagtgcagttgtca

SEQ ID NO: 8235 - DNA, 40 bp, synthetic construct
  source 1..40: mol_type = other DNA
tcaaaccatactcgctcaccttattgatccctgggttaac

SEQ ID NO: 8236 - DNA, 40 bp, synthetic construct
  source 1..40: mol_type = other DNA
cgtacaccacaccatctttgatgtggttacagggaagcca

SEQ ID NO: 8237 - DNA, 40 bp, synthetic construct
  source 1..40: mol_type = other DNA
tcccaaccgtgaccttcttgcatcttctggatgtcatctt

SEQ ID NO: 8238 - DNA, 40 bp, synthetic construct
  source 1..40: mol_type = other DNA
gcgtctgcttattcttgtctgtctgcgttctctttctcca

SEQ ID NO: 8239 - DNA, 40 bp, synthetic construct
  source 1..40: mol_type = other DNA
agtcgatatggaattcgctgattcatcaactactcgacca

SEQ ID NO: 8240 - DNA, 40 bp, synthetic construct
  source 1..40: mol_type = other DNA
cgaactacatggtatttccctgccaccactcctcgtgaaa

SEQ ID NO: 8241 - DNA, 40 bp, synthetic construct
  source 1..40: mol_type = other DNA
tccaggtccgtgaacactgccgaagagggcggcgagaatc

SEQ ID NO: 8242 - DNA, 40 bp, synthetic construct
  source 1..40: mol_type = other DNA
caggagtgagaagttgctacctgggaacgggcacattggt

SEQ ID NO: 8243 - DNA, 40 bp, synthetic construct
  source 1..40: mol_type = other DNA
agcaagtgtacaaccctgtgtgtctgagtgtggttgtaat

SEQ ID NO: 8244 - DNA, 40 bp, synthetic construct
  source 1..40: mol_type = other DNA
cctttcttctcgtgcagtgtggacaggcagtgcaacgtcc

SEQ ID NO: 8245 - DNA, 40 bp, synthetic construct
  source 1..40: mol_type = other DNA
ggccatgtagttggaggactggaacgtagttatcgtaagg

SEQ ID NO: 8246 - DNA, 40 bp, synthetic construct
  source 1..40: mol_type = other DNA
agaaattggcaagccgtaacaagtactttgcatacagacg

SEQ ID NO: 8247 - DNA, 40 bp, synthetic construct
  source 1..40: mol_type = other DNA
gaacagcatctggtgctgagaacagcacgtcatccttata

SEQ ID NO: 8248 - DNA, 40 bp, synthetic construct
  source 1..40: mol_type = other DNA
ggagttaaagtgatgtggaaccagaagcttcgatgctcat

SEQ ID NO: 8249 - DNA, 40 bp, synthetic construct
  source 1..40: mol_type = other DNA
tgagtagaccgagccgaagcttgtcggagacgcggatgcc

SEQ ID NO: 8250 - DNA, 40 bp, synthetic construct
  source 1..40: mol_type = other DNA
ccgcgattgaggtcgataagagtcgatgagcttgagctcg

SEQ ID NO: 8251 - DNA, 40 bp, synthetic construct
  source 1..40: mol_type = other DNA
tatgtgccacaccacccaggctggagggtcttctgcaggg

SEQ ID NO: 8252 - DNA, 40 bp, synthetic construct
  source 1..40: mol_type = other DNA
caaatggaaatgtggctgtgaggtgaaggcagtaatgatg

SEQ ID NO: 8253 - DNA, 40 bp, synthetic construct
  source 1..40: mol_type = other DNA
gtgaatcgcaccgtttctccttgatgatctcgcggaatat

SEQ ID NO: 8254 - DNA, 40 bp, synthetic construct
  source 1..40: mol_type = other DNA
taactcttgtggcacaagtttaaggagaccactttgattg

SEQ ID NO: 8255 - DNA, 40 bp, synthetic construct
  source 1..40: mol_type = other DNA
gcgcttccagagttaaaagcgagcagagttcagtgtgcat

SEQ ID NO: 8256 - DNA, 40 bp, synthetic construct
  source 1..40: mol_type = other DNA
ccttgggtttcgatgcttggcctacatagaattgcctacc

SEQ ID NO: 8257 - DNA, 40 bp, synthetic construct
  source 1..40: mol_type = other DNA
gagtacagtccactggagtcagggtgtccagtcaatttgt

SEQ ID NO: 8258 - DNA, 40 bp, synthetic construct
  source 1..40: mol_type = other DNA
gactccaaggattccattcattttcccttcttcgtgcatg

SEQ ID NO: 8259 - DNA, 40 bp, synthetic construct
  source 1..40: mol_type = other DNA
tccgataggcgtgctgtgatgcgggacttctcctctcaca

SEQ ID NO: 8260 - DNA, 40 bp, synthetic construct
  source 1..40: mol_type = other DNA
gagctgcgtgtccttccaaggacgtgggaatagccgtcag

SEQ ID NO: 8261 - DNA, 40 bp, synthetic construct
  source 1..40: mol_type = other DNA
acatgaggccatttaggtccacccgcaggatcttccagcc

SEQ ID NO: 8262 - DNA, 40 bp, synthetic construct
  source 1..40: mol_type = other DNA
cagaggagaaatggtgctaatccgtaagcatttccgaagc

SEQ ID NO: 8263 - DNA, 40 bp, synthetic construct
  source 1..40: mol_type = other DNA
ttgcacacagtgccaaacacatccttcaggacaggcgaac

SEQ ID NO: 8264 - DNA, 40 bp, synthetic construct
  source 1..40: mol_type = other DNA
cacttgctctttggtcttctactgctcctccaacatttgt

SEQ ID NO: 8265 - DNA, 40 bp, synthetic construct
  source 1..40: mol_type = other DNA
gtagtctctcttcaattaggatgcagcttagcactctgta

SEQ ID NO: 8266 - DNA, 40 bp, synthetic construct
  source 1..40: mol_type = other DNA
ggtcaggattctagtgtcttaggcaagggcagaatgtaca

SEQ ID NO: 8267 - DNA, 40 bp, synthetic construct
  source 1..40: mol_type = other DNA
caaggtgtgcggtccagctcggaagtggaaaaccgtgtcc

SEQ ID NO: 8268 - DNA, 40 bp, synthetic construct
  source 1..40: mol_type = other DNA
tctttgacgaatgcttttcctggcgatgcattttaagctc

SEQ ID NO: 8269 - DNA, 40 bp, synthetic construct
  source 1..40: mol_type = other DNA
atcaggctaggcttatgcaatacgtgccagatttcaggca

SEQ ID NO: 8270 - DNA, 40 bp, synthetic construct
  source 1..40: mol_type = other DNA
ttgcattcttccagtgtctcgaccatcttcacaaatgttc

SEQ ID NO: 8271 - DNA, 40 bp, synthetic construct
  source 1..40: mol_type = other DNA
atcagctgtaccctgacttcatagtgattctgtagctggc

SEQ ID NO: 8272 - DNA, 40 bp, synthetic construct
  source 1..40: mol_type = other DNA
ttggttcgggagcggtatgttgttgtatttgctggtgaag

SEQ ID NO: 8273 - DNA, 40 bp, synthetic construct
  source 1..40: mol_type = other DNA
cctatctgcagagcagtgctacgcggagccggtagtctag

SEQ ID NO: 8274 - DNA, 40 bp, synthetic construct
  source 1..40: mol_type = other DNA
tgtcattgaggcctatccacgaagtcatgctcaaacatct

SEQ ID NO: 8275 - DNA, 40 bp, synthetic construct
  source 1..40: mol_type = other DNA
ggttgaacacatccataagaagcgcatgggttactattaa

SEQ ID NO: 8276 - DNA, 40 bp, synthetic construct
  source 1..40: mol_type = other DNA
ctgaaaaactgcagaaaggctccaaatctatcttgcgctc

SEQ ID NO: 8277 - DNA, 40 bp, synthetic construct
  source 1..40: mol_type = other DNA
tgacgtacgtcacgcagggccagccacactttcatattgc

SEQ ID NO: 8278 - DNA, 40 bp, synthetic construct
  source 1..40: mol_type = other DNA
aacgttgacttccatgttcctcatgcatgatggcaccata

SEQ ID NO: 8279 - DNA, 40 bp, synthetic construct
  source 1..40: mol_type = other DNA
gtcctgtctcggaagatctgggataaggcactggatatcc

SEQ ID NO: 8280 - DNA, 40 bp, synthetic construct
  source 1..40: mol_type = other DNA
ttataaggcagttgagtgacctcggcagaacttgacaatg

SEQ ID NO: 8281 - DNA, 40 bp, synthetic construct
  source 1..40: mol_type = other DNA
ctattgtgaggaatacagggtgcaagtccaatgacgaaaa

SEQ ID NO: 8282 - DNA, 40 bp, synthetic construct
  source 1..40: mol_type = other DNA
atagtcagggtcaaagccaacggatgcaagtctggccaac

SEQ ID NO: 8283 - DNA, 40 bp, synthetic construct
  source 1..40: mol_type = other DNA
ctagggttccttcgtcctgactgtgtggtgagtgtaaact

SEQ ID NO: 8284 - DNA, 40 bp, synthetic construct
  source 1..40: mol_type = other DNA
ctcatgccataggaaggaccttttggactgcacttcgcgg

SEQ ID NO: 8285 - DNA, 40 bp, synthetic construct
  source 1..40: mol_type = other DNA
attggatgtttctgggttaggtgcgagcttcagtttgaga

SEQ ID NO: 8286 - DNA, 40 bp, synthetic construct
  source 1..40: mol_type = other DNA
ccagacttgctgtccctctcgagtcatacaggaaatcctg

SEQ ID NO: 8287 - DNA, 40 bp, synthetic construct
  source 1..40: mol_type = other DNA
ggcacacacttggcggttctacccatttcttctctgggtt

SEQ ID NO: 8288 - DNA, 40 bp, synthetic construct
  source 1..40: mol_type = other DNA
catgttgtggatgtactgggcgagaacgagatgtggacag

SEQ ID NO: 8289 - DNA, 40 bp, synthetic construct
  source 1..40: mol_type = other DNA
tcacctttgtctttgtccagtgaatgcgtgagccctttgc

SEQ ID NO: 8290 - DNA, 40 bp, synthetic construct
  source 1..40: mol_type = other DNA
tgatctagccttgtccttccaatgccgtcaaggttcttca

SEQ ID NO: 8291 - DNA, 40 bp, synthetic construct
  source 1..40: mol_type = other DNA
tgagcttgctcgctcgggagccagtggatcgggtgtaaac

SEQ ID NO: 8292 - DNA, 40 bp, synthetic construct
  source 1..40: mol_type = other DNA
ggaccctgttgcaacagagctttgtagtcctgctgcgatt

SEQ ID NO: 8293 - DNA, 40 bp, synthetic construct
  source 1..40: mol_type = other DNA
aataaaagagcaggagggaagggattaatgcccttatagc

SEQ ID NO: 8294 - DNA, 40 bp, synthetic construct
  source 1..40: mol_type = other DNA
cagtccaggattgtcagacagccatcagtccgcgttcgcc

SEQ ID NO: 8295 - DNA, 40 bp, synthetic construct
  source 1..40: mol_type = other DNA
acgttgcgtaggcgcaagctaacgccctgtcgcccacgac

SEQ ID NO: 8296 - DNA, 40 bp, synthetic construct
  source 1..40: mol_type = other DNA
aaggatgactgacgggatgacaaggatcccgactgcaata

SEQ ID NO: 8297 - DNA, 40 bp, synthetic construct
  source 1..40: mol_type = other DNA
acccacatgggaatggacatttggacactgaacattgtcc

SEQ ID NO: 8298 - DNA, 40 bp, synthetic construct
  source 1..40: mol_type = other DNA
ttccagcgtcttgagctgtggccacggtgacaataatact

SEQ ID NO: 8299 - DNA, 40 bp, synthetic construct
  source 1..40: mol_type = other DNA
ggcaagtgcttcttatgagagagacccaagagaaatcggg

SEQ ID NO: 8300 - DNA, 40 bp, synthetic construct
  source 1..40: mol_type = other DNA
caggaaaggcacatttatcattcactgagcctatcatatg

SEQ ID NO: 8301 - DNA, 40 bp, synthetic construct
  source 1..40: mol_type = other DNA
caccatagatgaagaggattgaacaaggcagtgagaatga

SEQ ID NO: 8302 - DNA, 40 bp, synthetic construct
  source 1..40: mol_type = other DNA
cgtcgtaggtgtccttggtgcagggcctgcatgtgaaggg

SEQ ID NO: 8303 - DNA, 40 bp, synthetic construct
  source 1..40: mol_type = other DNA
gtatggttttcctcaggatcctgggatgaccaattcagct

SEQ ID NO: 8304 - DNA, 40 bp, synthetic construct
  source 1..40: mol_type = other DNA
cactgagactctcagtcatgtaaatactgtcccgttccaa

SEQ ID NO: 8305 - DNA, 40 bp, synthetic construct
  source 1..40: mol_type = other DNA
aactgtgcaccagctgtttgctggtcccggccttcggtga

SEQ ID NO: 8306 - DNA, 40 bp, synthetic construct
  source 1..40: mol_type = other DNA
gcgaagggtttggaagaggactgagacgaccgagcggtca

SEQ ID NO: 8307 - DNA, 40 bp, synthetic construct
  source 1..40: mol_type = other DNA
tatagcaagccaggactccaggccactgttactagcaagc

SEQ ID NO: 8308 - DNA, 40 bp, synthetic construct
  source 1..40: mol_type = other DNA
acataggtaagcctagcctggcattcacatgacacagaac

SEQ ID NO: 8309 - DNA, 40 bp, synthetic construct
  source 1..40: mol_type = other DNA
gggttggtttcctcttttgaacatggaaagctcatcttag

SEQ ID NO: 8310 - DNA, 40 bp, synthetic construct
  source 1..40: mol_type = other DNA
atctacacatgacctgagagccaatcacttgatttatcgc

SEQ ID NO: 8311 - DNA, 40 bp, synthetic construct
  source 1..40: mol_type = other DNA
accagtcaatctaaagcccaagtgcacctttcatgtgcaa

SEQ ID NO: 8312 - DNA, 40 bp, synthetic construct
  source 1..40: mol_type = other DNA
aacctgcctagcttgcttacgttctaagtagccaatccta

SEQ ID NO: 8313 - DNA, 40 bp, synthetic construct
  source 1..40: mol_type = other DNA
atttcacttctctgatgcctcaggcagatgccctgagtca

SEQ ID NO: 8314 - DNA, 40 bp, synthetic construct
  source 1..40: mol_type = other DNA
aactctaaaaaccctggacatcttatgcctcctgttaact

SEQ ID NO: 8315 - DNA, 40 bp, synthetic construct
  source 1..40: mol_type = other DNA
atccattgagcatcacatgggtcaaagattttactgcggg

SEQ ID NO: 8316 - DNA, 40 bp, synthetic construct
  source 1..40: mol_type = other DNA
cgttgacacaaatggtgactcgtggacatggcactaaaca

SEQ ID NO: 8317 - DNA, 40 bp, synthetic construct
  source 1..40: mol_type = other DNA
caacagagcttgtgtgtcggtgatagacctggtcattcct

SEQ ID NO: 8318 - DNA, 40 bp, synthetic construct
  source 1..40: mol_type = other DNA
ggctgtactgagcatcatctagcccagtttcctccaaggt

SEQ ID NO: 8319 - DNA, 40 bp, synthetic construct
  source 1..40: mol_type = other DNA
catcttctggtttgcttcctcaggtagagataaaagttcg

SEQ ID NO: 8320 - DNA, 40 bp, synthetic construct
  source 1..40: mol_type = other DNA
catgggactgttactttactgcccgactgcatctttgttt

SEQ ID NO: 8321 - DNA, 40 bp, synthetic construct
  source 1..40: mol_type = other DNA
attctctcgaatctaccgggtatttgcagctctgagtaag

SEQ ID NO: 8322 - DNA, 40 bp, synthetic construct
  source 1..40: mol_type = other DNA
ataactgaatgtgagctgagataggaacccagagtcaacc

SEQ ID NO: 8323 - DNA, 40 bp, synthetic construct
  source 1..40: mol_type = other DNA
gggtagatgtcttcaggattcatcatcagtagggttgctg

SEQ ID NO: 8324 - DNA, 40 bp, synthetic construct
  source 1..40: mol_type = other DNA
aagagggatgccaagatgatcaagaatcaaagccaaggcc

SEQ ID NO: 8325 - DNA, 40 bp, synthetic construct
  source 1..40: mol_type = other DNA
gaaatcagaagagggccatggagctaagatactcaaacct

SEQ ID NO: 8326 - DNA, 40 bp, synthetic construct
  source 1..40: mol_type = other DNA
taggtgacaaccagttacttacaatcacgtaagggtctca

SEQ ID NO: 8327 - DNA, 40 bp, synthetic construct
  source 1..40: mol_type = other DNA
ggcgtatctgtgtgaggacttgcccgctgcttctcaaaca

SEQ ID NO: 8328 - DNA, 40 bp, synthetic construct
  source 1..40: mol_type = other DNA
gcaactttcctgttttcgctcaccaggttcacttcctgat

SEQ ID NO: 8329 - DNA, 40 bp, synthetic construct
  source 1..40: mol_type = other DNA
atgccgtaagaagcacttgacagtgtgcagtccatattaa

SEQ ID NO: 8330 - DNA, 40 bp, synthetic construct
  source 1..40: mol_type = other DNA
tccgacacatcaaaggtgataattctttcactgaagtgcc

SEQ ID NO: 8331 - DNA, 40 bp, synthetic construct
  source 1..40: mol_type = other DNA
ttaaggtgtctcaggttctcctatggtctccatggtgttc

SEQ ID NO: 8332 - DNA, 40 bp, synthetic construct
  source 1..40: mol_type = other DNA
ccctagaggcagcgattaaggaggctgctacaatcagctc

SEQ ID NO: 8333 - DNA, 40 bp, synthetic construct
  source 1..40: mol_type = other DNA
acagcatagagctcagtttctgaaatccagtttgctgcta

SEQ ID NO: 8334 - DNA, 40 bp, synthetic construct
  source 1..40: mol_type = other DNA
ccgcttgaaagcgtctttttgtcacttcagccaggtgttc

SEQ ID NO: 8335 - DNA, 40 bp, synthetic construct
  source 1..40: mol_type = other DNA
aatccaaggaatgtggtctgactgttggaagtacagctgt

SEQ ID NO: 8336 - DNA, 40 bp, synthetic construct
  source 1..40: mol_type = other DNA
gatacattgatacaagccctgtgggctttttgtgatggat

SEQ ID NO: 8337 - DNA, 40 bp, synthetic construct
  source 1..40: mol_type = other DNA
cgcatttggaggatgtgatggccggcccggagcctgattt

SEQ ID NO: 8338 - DNA, 40 bp, synthetic construct
  source 1..40: mol_type = other DNA
tctgcgggtagctctggcctctcagcatgattctgagaac

SEQ ID NO: 8339 - DNA, 40 bp, synthetic construct
  source 1..40: mol_type = other DNA
ccaagaatactgtgagggtgtggaatgtgccattgacaga

SEQ ID NO: 8340 - DNA, 40 bp, synthetic construct
  source 1..40: mol_type = other DNA
gaagggaattgcttttcacgcgtgctgcagttagacgaaa

SEQ ID NO: 8341 - DNA, 40 bp, synthetic construct
  source 1..40: mol_type = other DNA
tttggacaaggactgctgttctctgttctgaatccaattg

SEQ ID NO: 8342 - DNA, 40 bp, synthetic construct
  source 1..40: mol_type = other DNA
aacttgctgttcaccaggatcatccttcaccagtttatag

SEQ ID NO: 8343 - DNA, 40 bp, synthetic construct
  source 1..40: mol_type = other DNA
gacacagtcaaagatgctctacgtcgctctgaaccgtgta

SEQ ID NO: 8344 - DNA, 40 bp, synthetic construct
  source 1..40: mol_type = other DNA
tgacctcatccagtttccaacacgcaatcaagcactgcta

SEQ ID NO: 8345 - DNA, 40 bp, synthetic construct
  source 1..40: mol_type = other DNA
aggaactggtgtaaaagccccttccttgcaaaccattgaa

SEQ ID NO: 8346 - DNA, 40 bp, synthetic construct
  source 1..40: mol_type = other DNA
ttttcagttgagcaatccactgcagcctttgtttccatat

SEQ ID NO: 8347 - DNA, 40 bp, synthetic construct
  source 1..40: mol_type = other DNA
gagtccttgaattagtgggcagcagttgctcccacagtaa

SEQ ID NO: 8348 - DNA, 40 bp, synthetic construct
  source 1..40: mol_type = other DNA
atgcctggttctgttgataggattgcgcgtttgccgcatg

SEQ ID NO: 8349 - DNA, 40 bp, synthetic construct
  source 1..40: mol_type = other DNA
cattgggcccactcccacccggaagagccagaacaaagtg

SEQ ID NO: 8350 - DNA, 40 bp, synthetic construct
  source 1..40: mol_type = other DNA
aatttgagccacagaggccgtctcagtttggtggcggtgg

SEQ ID NO: 8351 - DNA, 40 bp, synthetic construct
  source 1..40: mol_type = other DNA
ttccggaaggaaagcgccgtcgccctgaatccagcgtcct

SEQ ID NO: 8352 - DNA, 40 bp, synthetic construct
  source 1..40: mol_type = other DNA
cgtccgtagaaaggtagttggacgagggtgcaggatccca

SEQ ID NO: 8353 - DNA, 40 bp, synthetic construct
  source 1..40: mol_type = other DNA
ccgtgctgtagacgacaggccaccaccagcgcgtagtagg

SEQ ID NO: 8354 - DNA, 40 bp, synthetic construct
  source 1..40: mol_type = other DNA
cgataatctagcaacagacgtgggcattaacacttttgga

SEQ ID NO: 8355 - DNA, 40 bp, synthetic construct
  source 1..40: mol_type = other DNA
ggcagatatgaaaggcatggggaatcacaggactcgattt

SEQ ID NO: 8356 - DNA, 40 bp, synthetic construct
  source 1..40: mol_type = other DNA
tcgtgtaatcttggtggatgcatgcggatcaagttctgcg

SEQ ID NO: 8357 - DNA, 40 bp, synthetic construct
  source 1..40: mol_type = other DNA
tatattcggttcccggttcccagggcaatgacataaattg

SEQ ID NO: 8358 - DNA, 40 bp, synthetic construct
  source 1..40: mol_type = other DNA
gggaacttgaaggcagccactactctgtaaccagtaacag

SEQ ID NO: 8359 - DNA, 40 bp, synthetic construct
  source 1..40: mol_type = other DNA
ggtcgcatgttgtggaacttgcgtggcgtaggtgaaaggg

SEQ ID NO: 8360 - DNA, 40 bp, synthetic construct
  source 1..40: mol_type = other DNA
cttgaccgtcgatgttaaaagtagggcgggacgtggttgc

SEQ ID NO: 8361 - DNA, 40 bp, synthetic construct
  source 1..40: mol_type = other DNA
tcgctctgtctcgctctcccgctcggtcagattgcgttgc

SEQ ID NO: 8362 - DNA, 40 bp, synthetic construct
  source 1..40: mol_type = other DNA
tcgcgccatcgtgacctccctcatgaaatttctgcagacg

SEQ ID NO: 8363 - DNA, 40 bp, synthetic construct
  source 1..40: mol_type = other DNA
ggcccgaggaaacgcagatcgcacaatcctagacagtgta

SEQ ID NO: 8364 - DNA, 40 bp, synthetic construct
  source 1..40: mol_type = other DNA
ggcatctccgattctccagtagcgcagttatcctacacaa

SEQ ID NO: 8365 - DNA, 40 bp, synthetic construct
  source 1..40: mol_type = other DNA
tcataaagttcacacctgcagcggtcaatactcaggcagg

SEQ ID NO: 8366 - DNA, 40 bp, synthetic construct
  source 1..40: mol_type = other DNA
tattcattccaatcacaggggaggcttccagcacaaacca

SEQ ID NO: 8367 - DNA, 40 bp, synthetic construct
  source 1..40: mol_type = other DNA
ggttcctggtttcacatcgtcaccctgcaacttggcacat

SEQ ID NO: 8368 - DNA, 40 bp, synthetic construct
  source 1..40: mol_type = other DNA
agttagtagcgtttcatggtgggcttagtttgcttcctgt

SEQ ID NO: 8369 - DNA, 40 bp, synthetic construct
  source 1..40: mol_type = other DNA
acgttcacactggcagtcctctgtaattgccatggaagag

SEQ ID NO: 8370 - DNA, 40 bp, synthetic construct
  source 1..40: mol_type = other DNA
gcaagatcatgcctatagttcagttctagagatctgcact

SEQ ID NO: 8371 - DNA, 40 bp, synthetic construct
  source 1..40: mol_type = other DNA
tgatgtccgccatactggattcagaacacctccacaaacg

SEQ ID NO: 8372 - DNA, 40 bp, synthetic construct
  source 1..40: mol_type = other DNA
atctagagtcccgtaactcagtcccgtaagtcattggcca

SEQ ID NO: 8373 - DNA, 40 bp, synthetic construct
  source 1..40: mol_type = other DNA
aaaggttgtgagggttgctggcattgcaaagcgacaaccc

SEQ ID NO: 8374 - DNA, 40 bp, synthetic construct
  source 1..40: mol_type = other DNA
ttgatgatgaagatggtccccattgcttttgcgcaatccc

SEQ ID NO: 8375 - DNA, 40 bp, synthetic construct
  source 1..40: mol_type = other DNA
tgggctctctcagttccacatatgaaacagatgaggacgt

SEQ ID NO: 8376 - DNA, 40 bp, synthetic construct
  source 1..40: mol_type = other DNA
gggaagatgatcattcttagtccaagtaagagaacaccct

SEQ ID NO: 8377 - DNA, 40 bp, synthetic construct
  source 1..40: mol_type = other DNA
agggaaggcgagaccgggagaggctttcatgctgaccgcg

SEQ ID NO: 8378 - DNA, 40 bp, synthetic construct
  source 1..40: mol_type = other DNA
ttctccaagcaagaagctatggtgaaacacttgaagggct

SEQ ID NO: 8379 - DNA, 40 bp, synthetic construct
  source 1..40: mol_type = other DNA
ttaaagcactggctcagattaagttctgtctgacatgcca

SEQ ID NO: 8380 - DNA, 40 bp, synthetic construct
  source 1..40: mol_type = other DNA
tatttggaagcaccaggcatacagtcacagttgtcaacaa

SEQ ID NO: 8381 - DNA, 40 bp, synthetic construct
  source 1..40: mol_type = other DNA
gtactcgccttggcgccactgtgtgctggaccacgcattt

SEQ ID NO: 8382 - DNA, 40 bp, synthetic construct
  source 1..40: mol_type = other DNA
tggtcaccttgtaggtcgtgctctttgatggtcagtgtgc

SEQ ID NO: 8383 - DNA, 40 bp, synthetic construct
  source 1..40: mol_type = other DNA
tatacacagcaaagcagtgtttatttcagggcaacaagcg

SEQ ID NO: 8384 - DNA, 40 bp, synthetic construct
  source 1..40: mol_type = other DNA
acattcatacccatttcctccagagctttgtgttcaaggc

SEQ ID NO: 8385 - DNA, 40 bp, synthetic construct
  source 1..40: mol_type = other DNA
actgatttgggatgggtgtcttcatagcaggtactttcag

SEQ ID NO: 8386 - DNA, 40 bp, synthetic construct
  source 1..40: mol_type = other DNA
atgtctgggtcttggttctcgggagttcacatgcgccttg

SEQ ID NO: 8387 - DNA, 40 bp, synthetic construct
  source 1..40: mol_type = other DNA
gtctgtcttgtggtttggttgtgcatgccttcttttgcaa

SEQ ID NO: 8388 - DNA, 40 bp, synthetic construct
  source 1..40: mol_type = other DNA
caagtgttacctctgaagctttcagatctcatatcttggc

SEQ ID NO: 8389 - DNA, 40 bp, synthetic construct
  source 1..40: mol_type = other DNA
tggcggcactttgcctcccacagcgttgatgcagcccaag

SEQ ID NO: 8390 - DNA, 40 bp, synthetic construct
  source 1..40: mol_type = other DNA
acagattcttttccttgaggtttcaacacgcaggacaggt

SEQ ID NO: 8391 - DNA, 40 bp, synthetic construct
  source 1..40: mol_type = other DNA
aggctatagccgtactcaaatgtagacaacaggaaagtcc

SEQ ID NO: 8392 - DNA, 40 bp, synthetic construct
  source 1..40: mol_type = other DNA
acgagtggctagagtttcctttgacattggttgtcccagg

SEQ ID NO: 8393 - DNA, 40 bp, synthetic construct
  source 1..40: mol_type = other DNA
ccagtctctatcggagtcagtgtcacccttgtgggtccat

SEQ ID NO: 8394 - DNA, 40 bp, synthetic construct
  source 1..40: mol_type = other DNA
gggtcgtaagtaaagtacaccagggtcttcctctgagtag

SEQ ID NO: 8395 - DNA, 40 bp, synthetic construct
  source 1..40: mol_type = other DNA
acactaagatgatgaagccacctgcagttgatcagcaagt

SEQ ID NO: 8396 - DNA, 40 bp, synthetic construct
  source 1..40: mol_type = other DNA
tcaaatctgttctggaggtatggcttgttcctcactactc

SEQ ID NO: 8397 - DNA, 40 bp, synthetic construct
  source 1..40: mol_type = other DNA
gcggctacatctttggaatctgagtggctgtctgtgtggg

SEQ ID NO: 8398 - DNA, 40 bp, synthetic construct
  source 1..40: mol_type = other DNA
cggtaagctacatcgtgcattgttttcatccttttcctgg

SEQ ID NO: 8399 - DNA, 40 bp, synthetic construct
  source 1..40: mol_type = other DNA
atgcagttgggtggtagcagtcctctgagatcatggacgg

SEQ ID NO: 8400 - DNA, 40 bp, synthetic construct
  source 1..40: mol_type = other DNA
aaagttggccttccacgtctagggagttcatggcacagcg

SEQ ID NO: 8401 - DNA, 40 bp, synthetic construct
  source 1..40: mol_type = other DNA
cgttaaacaagatctcagctcagcagggtgaacacggaat

SEQ ID NO: 8402 - DNA, 40 bp, synthetic construct
  source 1..40: mol_type = other DNA
tgtcacactggattctctggctggatgccaaagaacggga

SEQ ID NO: 8403 - DNA, 40 bp, synthetic construct
  source 1..40: mol_type = other DNA
acgtttgtcaatgtaaaggcctcccaagcaggttcttaga

SEQ ID NO: 8404 - DNA, 40 bp, synthetic construct
  source 1..40: mol_type = other DNA
ggttcaggcagccctcagtgactacactcaacacgccgcg

SEQ ID NO: 8405 - DNA, 40 bp, synthetic construct
  source 1..40: mol_type = other DNA
gttggtcagcttcagcacgtgtctgaaactggttggagtt

SEQ ID NO: 8406 - DNA, 40 bp, synthetic construct
  source 1..40: mol_type = other DNA
attagtcaggatagcaggcatgcagtcagcaatgacttaa

SEQ ID NO: 8407 - DNA, 40 bp, synthetic construct
  source 1..40: mol_type = other DNA
gcctgtcgtaagtcaggattttggagcatgccattcacga

SEQ ID NO: 8408 - DNA, 40 bp, synthetic construct
  source 1..40: mol_type = other DNA
ctcgttagatgaagttcactctccttcggtgccttttaat

SEQ ID NO: 8409 - DNA, 40 bp, synthetic construct
  source 1..40: mol_type = other DNA
gtgaaatccatagaagtggccatgaggaactcgcaagaga

SEQ ID NO: 8410 - DNA, 40 bp, synthetic construct
  source 1..40: mol_type = other DNA
cagtttaagagacccggtctgttgctgccaatatattggg

SEQ ID NO: 8411 - DNA, 40 bp, synthetic construct
  source 1..40: mol_type = other DNA
aggctggatttctgagaagcctgtgttttgaagctgaagc

SEQ ID NO: 8412 - DNA, 40 bp, synthetic construct
  source 1..40: mol_type = other DNA
ttttagcaatactccctgaggaacaacttcctttttggca

SEQ ID NO: 8413 - DNA, 40 bp, synthetic construct
  source 1..40: mol_type = other DNA
cccaagacagaaatcttaggcaactgcatgcaccaaaagc

SEQ ID NO: 8414 - DNA, 40 bp, synthetic construct
  source 1..40: mol_type = other DNA
agtgattaggtcaaatcccttcagccaccacctgaaaatt

SEQ ID NO: 8415 - DNA, 40 bp, synthetic construct
  source 1..40: mol_type = other DNA
cgaagggtaaagtcgccattcctggctcacatcctctagt

SEQ ID NO: 8416 - DNA, 40 bp, synthetic construct
  source 1..40: mol_type = other DNA
gatcatggtctggatctgcattctgtcaggaaccctgtgt

SEQ ID NO: 8417 - DNA, 40 bp, synthetic construct
  source 1..40: mol_type = other DNA
gtgggtctgttttccgaggattcagggcaagaatagagat

SEQ ID NO: 8418 - DNA, 40 bp, synthetic construct
  source 1..40: mol_type = other DNA
tgtacctcaccctccacttactcatcagcagcccagttag

SEQ ID NO: 8419 - DNA, 40 bp, synthetic construct
  source 1..40: mol_type = other DNA
gctacacaatcattccgttcacccagaagacgcatgtaaa

SEQ ID NO: 8420 - DNA, 40 bp, synthetic construct
  source 1..40: mol_type = other DNA
cccacagaatggaagttccatgcttattgtcagtctcttc

SEQ ID NO: 8421 - DNA, 40 bp, synthetic construct
  source 1..40: mol_type = other DNA
ttggatgctagctgcggagtctcaaatctcaagggctgat

SEQ ID NO: 8422 - DNA, 40 bp, synthetic construct
  source 1..40: mol_type = other DNA
tcccaaaatcattctcagagcactgcagtacagttgtagt

SEQ ID NO: 8423 - DNA, 40 bp, synthetic construct
  source 1..40: mol_type = other DNA
ttggaatgccatacttcttccttccttggcatcataccac

SEQ ID NO: 8424 - DNA, 40 bp, synthetic construct
  source 1..40: mol_type = other DNA
ggttttggtctgtccacggcctttgttaatccgctcaggg

SEQ ID NO: 8425 - DNA, 40 bp, synthetic construct
  source 1..40: mol_type = other DNA
gctgaaggtctgcgtcacgtgcccacagaacagccataat

SEQ ID NO: 8426 - DNA, 40 bp, synthetic construct
  source 1..40: mol_type = other DNA
gtggtgacaggtctttttgttgttcacttccctctttgtt

SEQ ID NO: 8427 - DNA, 40 bp, synthetic construct
  source 1..40: mol_type = other DNA
gtggaacgaggccttccctactcacttggacttgaggtat

SEQ ID NO: 8428 - DNA, 40 bp, synthetic construct
  source 1..40: mol_type = other DNA
tggtggcatactccgtctgccattccgctaggaaagacaa

SEQ ID NO: 8429 - DNA, 40 bp, synthetic construct
  source 1..40: mol_type = other DNA
caaaaagcctgcgccgcctccgcaggcgcaaacctcacta

SEQ ID NO: 8430 - DNA, 40 bp, synthetic construct
  source 1..40: mol_type = other DNA
taagcgtagccaggttctggaaaagccttgttggaaggct

SEQ ID NO: 8431 - DNA, 40 bp, synthetic construct
  source 1..40: mol_type = other DNA
tcacaaggtccatctatttgagactggttgtccagagatg

SEQ ID NO: 8432 - DNA, 40 bp, synthetic construct
  source 1..40: mol_type = other DNA
gttacttggtcgttcaagtcggactccatatttgaggaga

SEQ ID NO: 8433 - DNA, 40 bp, synthetic construct
  source 1..40: mol_type = other DNA
aagggtagtgaagcctttctcattgtcagctctccgggat

SEQ ID NO: 8434 - DNA, 40 bp, synthetic construct
  source 1..40: mol_type = other DNA
tcaagtaagcgtaggagtccttccgtgccgtaggacgcgt

SEQ ID NO: 8435 - DNA, 40 bp, synthetic construct
  source 1..40: mol_type = other DNA
tgctgaagctgtactggtccgcggcactccaccgtgtcag

SEQ ID NO: 8436 - DNA, 40 bp, synthetic construct
  source 1..40: mol_type = other DNA
gcaaagcattgtgggcaaagggcctccatttgtctcaggg

SEQ ID NO: 8437 - DNA, 40 bp, synthetic construct
  source 1..40: mol_type = other DNA
cactagcctctttgcatccaccgtacagttctctctgagg

SEQ ID NO: 8438 - DNA, 40 bp, synthetic construct
  source 1..40: mol_type = other DNA
ctcaagtgttgcacataatctcagtttgaagtgatagcca

SEQ ID NO: 8439 - DNA, 40 bp, synthetic construct
  source 1..40: mol_type = other DNA
tctgggtgctctgacatttcgaagatgttccataagtccc

SEQ ID NO: 8440 - DNA, 40 bp, synthetic construct
  source 1..40: mol_type = other DNA
tgcactgaaggaaacacactcaggtagaaatcttcccaga

SEQ ID NO: 8441 - DNA, 40 bp, synthetic construct
  source 1..40: mol_type = other DNA
ctggttgtagaactcctcgaccatagcggtggacccatgt

SEQ ID NO: 8442 - DNA, 40 bp, synthetic construct
  source 1..40: mol_type = other DNA
taatcagggcattctgggtaccactccactagttcatcat

SEQ ID NO: 8443 - DNA, 40 bp, synthetic construct
  source 1..40: mol_type = other DNA
ctctccgcaactatagtgaagctgccgaacttgctgcaga

SEQ ID NO: 8444 - DNA, 40 bp, synthetic construct
  source 1..40: mol_type = other DNA
tgaatcttagcaggaaggtgtccttctttgctgctttcac

SEQ ID NO: 8445 - DNA, 40 bp, synthetic construct
  source 1..40: mol_type = other DNA
tcattgttagaagctgcctcgaagaatcgttgccatggtt

SEQ ID NO: 8446 - DNA, 40 bp, synthetic construct
  source 1..40: mol_type = other DNA
catacacacttggagacatgcaggttttctctcaacaccg

SEQ ID NO: 8447 - DNA, 40 bp, synthetic construct
  source 1..40: mol_type = other DNA
cgaggagcttggaaaggaggccaggaagtctgcattatca

SEQ ID NO: 8448 - DNA, 40 bp, synthetic construct
  source 1..40: mol_type = other DNA
ggcccgtaaagaatggaatgtagaatccagtcagtgaggc

SEQ ID NO: 8449 - DNA, 40 bp, synthetic construct
  source 1..40: mol_type = other DNA
ggctggtacttatggagggacctcaacgatatgcagccgg

SEQ ID NO: 8450 - DNA, 40 bp, synthetic construct
  source 1..40: mol_type = other DNA
atcttgcttcttgagatgtgacacaaccaccacaaacaat

SEQ ID NO: 8451 - DNA, 40 bp, synthetic construct
  source 1..40: mol_type = other DNA
ccagaatctaagtcaaggatcctattctcacttctctcca

SEQ ID NO: 8452 - DNA, 40 bp, synthetic construct
  source 1..40: mol_type = other DNA
tagtaaacgaaggtgaacagtggtggagaagacacaggca

SEQ ID NO: 8453 - DNA, 40 bp, synthetic construct
  source 1..40: mol_type = other DNA
actctggcgagtcgctgggtggtgacatcaaaagataacc

SEQ ID NO: 8454 - DNA, 40 bp, synthetic construct
  source 1..40: mol_type = other DNA
ttcatgccatgaatggtggctgagaagcaggaaaggccgg

SEQ ID NO: 8455 - DNA, 40 bp, synthetic construct
  source 1..40: mol_type = other DNA
atgaggaatgtgtctctcagagcccaaaatgctggccatt

SEQ ID NO: 8456 - DNA, 40 bp, synthetic construct
  source 1..40: mol_type = other DNA
gccagaagctggtcctgctgccaagtcagcattacaaatg

SEQ ID NO: 8457 - DNA, 40 bp, synthetic construct
  source 1..40: mol_type = other DNA
taggtgatcctgttgttggagtaggtcactgttgctaatg

SEQ ID NO: 8458 - DNA, 40 bp, synthetic construct
  source 1..40: mol_type = other DNA
gcatgctttgggaccaaaagtgaatgaaactccaggagta

SEQ ID NO: 8459 - DNA, 40 bp, synthetic construct
  source 1..40: mol_type = other DNA
aaactcaaggcttggtagatccatttctactgagatctag

SEQ ID NO: 8460 - DNA, 40 bp, synthetic construct
  source 1..40: mol_type = other DNA
aatcaagaaaaggtgacctcatcagcccatatgtttctgg

SEQ ID NO: 8461 - DNA, 40 bp, synthetic construct
  source 1..40: mol_type = other DNA
agtcgaccttcggtttgctcgagtggaaagcaatggtcag

SEQ ID NO: 8462 - DNA, 40 bp, synthetic construct
  source 1..40: mol_type = other DNA
agctgtatcggcaactgaaatccacagttagaggacaaaa

SEQ ID NO: 8463 - DNA, 40 bp, synthetic construct
  source 1..40: mol_type = other DNA
ctgccaaggtttttattgtgtgccggtcggagactcccgt

SEQ ID NO: 8464 - DNA, 40 bp, synthetic construct
  source 1..40: mol_type = other DNA
caagaaagaaggagatgatccaacgcagtcgacgtcagcg

SEQ ID NO: 8465 - DNA, 40 bp, synthetic construct
  source 1..40: mol_type = other DNA
gggatacttacatgacactttagcaaggatgtggatcaat

SEQ ID NO: 8466 - DNA, 40 bp, synthetic construct
  source 1..40: mol_type = other DNA
tagatgtcccatggcgtaggtggaccttcttcctctgaat

SEQ ID NO: 8467 - DNA, 40 bp, synthetic construct
  source 1..40: mol_type = other DNA
cactacttgaactttgaaggttctgtggagtcatccatat

SEQ ID NO: 8468 - DNA, 40 bp, synthetic construct
  source 1..40: mol_type = other DNA
ccaagtatcacacaggaggtagaaagaaaaaagctagccc

SEQ ID NO: 8469 - DNA, 40 bp, synthetic construct
  source 1..40: mol_type = other DNA
tagtcgggccgattgatctccagactcggcaaagtcgaga

SEQ ID NO: 8470 - DNA, 40 bp, synthetic construct
  source 1..40: mol_type = other DNA
gtttcgaagtggtggtcttgcacacattcctgaatcccag

SEQ ID NO: 8471 - DNA, 40 bp, synthetic construct
  source 1..40: mol_type = other DNA
agttgctgtcgtgatgagaaccatcttcccaggcatttta

SEQ ID NO: 8472 - DNA, 40 bp, synthetic construct
  source 1..40: mol_type = other DNA
cttactgtgggcacagaatcgcaattcttttacagcctgc

SEQ ID NO: 8473 - DNA, 40 bp, synthetic construct
  source 1..40: mol_type = other DNA
acccaagacagcagaaagttgcaaggcaaggctccaatgc

SEQ ID NO: 8474 - DNA, 40 bp, synthetic construct
  source 1..40: mol_type = other DNA
ttcccaaaactgggtcatatcagggctgggtttgtcggtg

SEQ ID NO: 8475 - DNA, 40 bp, synthetic construct
  source 1..40: mol_type = other DNA
tgtcaccagacgcggtgtgagctgatgacagccactcggt

SEQ ID NO: 8476 - DNA, 40 bp, synthetic construct
  source 1..40: mol_type = other DNA
agaaaagcagcaggcggtggggaagcttcctcgcggtgta

SEQ ID NO: 8477 - DNA, 40 bp, synthetic construct
  source 1..40: mol_type = other DNA
gctgcaactgaagctctgccgaaagaatgatgctcgagtt

SEQ ID NO: 8478 - DNA, 40 bp, synthetic construct
  source 1..40: mol_type = other DNA
tctgaatctgggcttggaggggttgtgtacatgactcgaa

SEQ ID NO: 8479 - DNA, 40 bp, synthetic construct
  source 1..40: mol_type = other DNA
tagcgatgctttcccatgcccagatattcctgctgatgtg

SEQ ID NO: 8480 - DNA, 40 bp, synthetic construct
  source 1..40: mol_type = other DNA
catgttgtctccaagctggtagcagagttgtcaagaacca

SEQ ID NO: 8481 - DNA, 40 bp, synthetic construct
  source 1..40: mol_type = other DNA
ttggagatggtccagttctggaggactcatcgttatatac

SEQ ID NO: 8482 - DNA, 40 bp, synthetic construct
  source 1..40: mol_type = other DNA
ggctctgagttctatgtttcgagagttggataagggatct

SEQ ID NO: 8483 - DNA, 40 bp, synthetic construct
  source 1..40: mol_type = other DNA
cacgtgaaggtgagctcatcggtagccgtttatggatgta

SEQ ID NO: 8484 - DNA, 40 bp, synthetic construct
  source 1..40: mol_type = other DNA
caaggagctgttctgtgggatagcggctgtccacgttttc

SEQ ID NO: 8485 - DNA, 40 bp, synthetic construct
  source 1..40: mol_type = other DNA
cgtgaggttcgcttctgaacctcaggccggtcagtgtgca

SEQ ID NO: 8486 - DNA, 40 bp, synthetic construct
  source 1..40: mol_type = other DNA
gtcttcgtggctcacgtccacagttgaacttgacctcagg

SEQ ID NO: 8487 - DNA, 40 bp, synthetic construct
  source 1..40: mol_type = other DNA
ccttcgcagctctcggaagcaggaaggccgtctgagtgag

SEQ ID NO: 8488 - DNA, 40 bp, synthetic construct
  source 1..40: mol_type = other DNA
ttgcttttgccatcgtgttgcttttgactactggacatct

SEQ ID NO: 8489 - DNA, 40 bp, synthetic construct
  source 1..40: mol_type = other DNA
gagtctaagaaatctgacagttctatggtttggtcctgtg

SEQ ID NO: 8490 - DNA, 40 bp, synthetic construct
  source 1..40: mol_type = other DNA
ggcgcgttccaggtctctccctccttacgagcaggtacaa

SEQ ID NO: 8491 - DNA, 40 bp, synthetic construct
  source 1..40: mol_type = other DNA
gctgctattgtgaagggcatgggtgttgtacaccttctcc

SEQ ID NO: 8492 - DNA, 40 bp, synthetic construct
  source 1..40: mol_type = other DNA
gttccgtgacagatccaaggggctgcacggtcaccaggtt

SEQ ID NO: 8493 - DNA, 40 bp, synthetic construct
  source 1..40: mol_type = other DNA
actgacccggtccgtgtgggaagctggcgcgcaagagacc

SEQ ID NO: 8494 - DNA, 40 bp, synthetic construct
  source 1..40: mol_type = other DNA
tttggccacctttccctgccctttgttcttggtctcagtg

SEQ ID NO: 8495 - DNA, 40 bp, synthetic construct
  source 1..40: mol_type = other DNA
gaaccagcctcttctgtgtcctcactgggtgccatcgtaa

SEQ ID NO: 8496 - DNA, 40 bp, synthetic construct
  source 1..40: mol_type = other DNA
tgaccatcattggtcaccttagtagtagcagctgatttgg

SEQ ID NO: 8497 - DNA, 40 bp, synthetic construct
  source 1..40: mol_type = other DNA
gaagtgatgggagaggcagctgacatatactccatgtagg

SEQ ID NO: 8498 - DNA, 40 bp, synthetic construct
  source 1..40: mol_type = other DNA
ttcgatttgggatttaggcatgattataagccttgcttgc

SEQ ID NO: 8499 - DNA, 40 bp, synthetic construct
  source 1..40: mol_type = other DNA
cctttcatccttcacataacgtttttggtcctttcaccca

SEQ ID NO: 8500 - DNA, 40 bp, synthetic construct
  source 1..40: mol_type = other DNA
gtgagtttttaagcagaggaggacttaattctcctccgta

SEQ ID NO: 8501 - DNA, 40 bp, synthetic construct
  source 1..40: mol_type = other DNA
atatcagcatcagggaatcttgcaggtgttcttagtggaa

SEQ ID NO: 8502 - DNA, 40 bp, synthetic construct
  source 1..40: mol_type = other DNA
ctgggtttagacatgtttgattccttcacatctgctgaat

SEQ ID NO: 8503 - DNA, 40 bp, synthetic construct
  source 1..40: mol_type = other DNA
gatcgaccctttaaagagctaggttttttttcctgttccc

SEQ ID NO: 8504 - DNA, 40 bp, synthetic construct
  source 1..40: mol_type = other DNA
taggaggcctctgaggtctctccggcctcacaagcccgag

SEQ ID NO: 8505 - DNA, 40 bp, synthetic construct
  source 1..40: mol_type = other DNA
taccctgctttctcggccacgtgaccgacttggccacgtc

SEQ ID NO: 8506 - DNA, 40 bp, synthetic construct
  source 1..40: mol_type = other DNA
ccaacaggcgaagaaagccaatcccaatgtagtaaggcag

SEQ ID NO: 8507 - DNA, 40 bp, synthetic construct
  source 1..40: mol_type = other DNA
gccaaccatgatgtgctgaaacaataccaggcaggataag

SEQ ID NO: 8508 - DNA, 40 bp, synthetic construct
  source 1..40: mol_type = other DNA
cttcctcgttgtcctgccgtaaaaaagggacgtcttaggg

SEQ ID NO: 8509 - DNA, 40 bp, synthetic construct
  source 1..40: mol_type = other DNA
gtttttagggactgagttgtgggcctggcagaatgtctgt

SEQ ID NO: 8510 - DNA, 40 bp, synthetic construct
  source 1..40: mol_type = other DNA
tctgcctctacttctgtgatagcttgctcatgaagcaagg

SEQ ID NO: 8511 - DNA, 40 bp, synthetic construct
  source 1..40: mol_type = other DNA
acgatgaggttacctttcctgaccagacaagtgcatataa

SEQ ID NO: 8512 - DNA, 40 bp, synthetic construct
  source 1..40: mol_type = other DNA
ggaattcgctccactgtgtttgatctgcaggttttccaaa

SEQ ID NO: 8513 - DNA, 40 bp, synthetic construct
  source 1..40: mol_type = other DNA
gtcccaaacagttttttccattttggttttctgaccggag

SEQ ID NO: 8514 - DNA, 40 bp, synthetic construct
  source 1..40: mol_type = other DNA
ctaccatacaaccacgcagtccttacacgcttgcttgctc

SEQ ID NO: 8515 - DNA, 40 bp, synthetic construct
  source 1..40: mol_type = other DNA
gcgggaaacggatacgccttcttcgacacaaatgtacatc

SEQ ID NO: 8516 - DNA, 40 bp, synthetic construct
  source 1..40: mol_type = other DNA
gaagtggagcatcgttagcttctcgctagacacggttcgg

SEQ ID NO: 8517 - DNA, 40 bp, synthetic construct
  source 1..40: mol_type = other DNA
ctgttacgtgtaacgccattgatgttagcgttcagtcgag

SEQ ID NO: 8518 - DNA, 40 bp, synthetic construct
  source 1..40: mol_type = other DNA
cacagttgaggttatctctgcaacgactacgtacgtagca

SEQ ID NO: 8519 - DNA, 40 bp, synthetic construct
  source 1..40: mol_type = other DNA
gacgcgacgcataaaaagcggtcccaattttcgctaaccc

SEQ ID NO: 8520 - DNA, 40 bp, synthetic construct
  source 1..40: mol_type = other DNA
gtcaggctatgattcaccaccctgcagcgtaattaataag

SEQ ID NO: 8521 - DNA, 40 bp, synthetic construct
  source 1..40: mol_type = other DNA
gcccggttcgctggctcagtagttggtaccaccactagaa

SEQ ID NO: 8522 - DNA, 40 bp, synthetic construct
  source 1..40: mol_type = other DNA
tacgggccttcgcaatcgcgccggcagttgctccattaaa

SEQ ID NO: 8523 - DNA, 40 bp, synthetic construct
  source 1..40: mol_type = other DNA
aatgtcccgtctcgagctggcctgctaacctgcatcagcc

SEQ ID NO: 8524 - DNA, 40 bp, synthetic construct
  source 1..40: mol_type = other DNA
tgacaaacactgcatttcgatctggttttgggtagctgtt

SEQ ID NO: 8525 - DNA, 40 bp, synthetic construct
  source 1..40: mol_type = other DNA
ctctgaagacatttttggacccaatggtctaagacaggta

SEQ ID NO: 8526 - DNA, 40 bp, synthetic construct
  source 1..40: mol_type = other DNA
gtgacaaactttttggcgtcctaccggccttcggagctca

SEQ ID NO: 8527 - DNA, 40 bp, synthetic construct
  source 1..40: mol_type = other DNA
ggcatggattttcacaaaccctgcacagcacgttccaggg

SEQ ID NO: 8528 - DNA, 40 bp, synthetic construct
  source 1..40: mol_type = other DNA
aacggagggacatttttgactccttcccggcttccataag

SEQ ID NO: 8529 - DNA, 40 bp, synthetic construct
  source 1..40: mol_type = other DNA
agtgccaaccaaaaatgcaagtctggctccggtaagtaag

SEQ ID NO: 8530 - DNA, 40 bp, synthetic construct
  source 1..40: mol_type = other DNA
gtacatccagagctccaaaccactgctcctacttatgtat

SEQ ID NO: 8531 - DNA, 40 bp, synthetic construct
  source 1..40: mol_type = other DNA
taggatgagttcaggttttcagggcacccagtacttgttg

SEQ ID NO: 8532 - DNA, 40 bp, synthetic construct
  source 1..40: mol_type = other DNA
aggtagtcagtcacatcttcatcctcatgacaactcgagg

SEQ ID NO: 8533 - DNA, 40 bp, synthetic construct
  source 1..40: mol_type = other DNA
ccgagatgacgcacatcagcgtccacgccgtgcacgctag

SEQ ID NO: 8534 - DNA, 40 bp, synthetic construct
  source 1..40: mol_type = other DNA
gaaaccgtcatggtgctgggccgccactttgagagtgtat

SEQ ID NO: 8535 - DNA, 40 bp, synthetic construct
  source 1..40: mol_type = other DNA
gtgaagtcagcactcttgccggccacgaggatcgaagtta

SEQ ID NO: 8536 - DNA, 40 bp, synthetic construct
  source 1..40: mol_type = other DNA
aacaactttctgaaggcccgttaatggaatccagcacatc

SEQ ID NO: 8537 - DNA, 40 bp, synthetic construct
  source 1..40: mol_type = other DNA
ctgtcagacgattcatgctgccggaccatgtagagcgcat

SEQ ID NO: 8538 - DNA, 40 bp, synthetic construct
  source 1..40: mol_type = other DNA
gtgattggcgatctccctgggctggagatgatattgatgg

SEQ ID NO: 8539 - DNA, 40 bp, synthetic construct
  source 1..40: mol_type = other DNA
gcacctccgacatggtcgcgcttctcgtcgccgtagggca

SEQ ID NO: 8540 - DNA, 40 bp, synthetic construct
  source 1..40: mol_type = other DNA
tctcccttaactcattgtcttgttaccgccgttcttattc

SEQ ID NO: 8541 - DNA, 40 bp, synthetic construct
  source 1..40: mol_type = other DNA
aacgatggacattcgtccagtccaggttctgcaggttctt

SEQ ID NO: 8542 - DNA, 40 bp, synthetic construct
  source 1..40: mol_type = other DNA
tctggaattccctctggaataatcggaatccgtattccgc

SEQ ID NO: 8543 - DNA, 40 bp, synthetic construct
  source 1..40: mol_type = other DNA
gatttgcgcacacagacaactttcacccaagtctgttttg

SEQ ID NO: 8544 - DNA, 40 bp, synthetic construct
  source 1..40: mol_type = other DNA
ccgcctttaaggatatatagctggaaagaagtctctgtag

SEQ ID NO: 8545 - DNA, 40 bp, synthetic construct
  source 1..40: mol_type = other DNA
gagcgatataggccacttctagttctctggcatcgacggg

SEQ ID NO: 8546 - DNA, 40 bp, synthetic construct
  source 1..40: mol_type = other DNA
gagaggaattcccaacataagctccaagacaaggccatag

SEQ ID NO: 8547 - DNA, 40 bp, synthetic construct
  source 1..40: mol_type = other DNA
cccaatactcatcttgcagtgtccttggcttgaatgatta

SEQ ID NO: 8548 - DNA, 40 bp, synthetic construct
  source 1..40: mol_type = other DNA
cggcattgtaggtgttcacagaggatggtgtaagcgatgg

SEQ ID NO: 8549 - DNA, 40 bp, synthetic construct
  source 1..40: mol_type = other DNA
tacgtgctgttcttcacgtgtagctatgattagggctgtg

SEQ ID NO: 8550 - DNA, 40 bp, synthetic construct
  source 1..40: mol_type = other DNA
cactgacatacattcagcccgttggctctggcatttatag

SEQ ID NO: 8551 - DNA, 40 bp, synthetic construct
  source 1..40: mol_type = other DNA
acatggtggcgagggtccgggtccaggaggtagctcacgt

SEQ ID NO: 8552 - DNA, 40 bp, synthetic construct
  source 1..40: mol_type = other DNA
gagaaggcattactgcctttacaaggctttggagaaatag

SEQ ID NO: 8553 - DNA, 40 bp, synthetic construct
  source 1..40: mol_type = other DNA
gctcccacttctcaaggacctgatagtgtccctgtagggt

SEQ ID NO: 8554 - DNA, 40 bp, synthetic construct
  source 1..40: mol_type = other DNA
attattgcggccagtagccagtgatgctcttgactatgga

SEQ ID NO: 8555 - DNA, 40 bp, synthetic construct
  source 1..40: mol_type = other DNA
ggtggccaaaaggaatcactgcagcagcagctcaacataa

SEQ ID NO: 8556 - DNA, 40 bp, synthetic construct
  source 1..40: mol_type = other DNA
agaagttattgcagttgtgctcagctttcaccaaaaggtc

SEQ ID NO: 8557 - DNA, 40 bp, synthetic construct
  source 1..40: mol_type = other DNA
aggctgcaatagccgtaccagatgatcactggcaaataga

SEQ ID NO: 8558 - DNA, 40 bp, synthetic construct
  source 1..40: mol_type = other DNA
gagggtgtacaagttcatggcagtaaccaatcacagtgta

SEQ ID NO: 8559 - DNA, 40 bp, synthetic construct
  source 1..40: mol_type = other DNA
taaagcacccacttatagtgaccactttgtttgacctcgt

SEQ ID NO: 8560 - DNA, 40 bp, synthetic construct
  source 1..40: mol_type = other DNA
tacagtgctccactctgctgtctcaatccagccaggtatg

SEQ ID NO: 8561 - DNA, 40 bp, synthetic construct
  source 1..40: mol_type = other DNA
cctggcagtgtttgctcctcagtggaggccgtaattttag

SEQ ID NO: 8562 - DNA, 40 bp, synthetic construct
  source 1..40: mol_type = other DNA
ggctgatcttcattgtactcttgacttagcacggtagaaa

SEQ ID NO: 8563 - DNA, 40 bp, synthetic construct
  source 1..40: mol_type = other DNA
taggagtaaatcctccactgtcacgatgttgtcgccggca

SEQ ID NO: 8564 - DNA, 40 bp, synthetic construct
  source 1..40: mol_type = other DNA
ccaatgacagccatcctcatcaagaagaaatatcgcaccc

SEQ ID NO: 8565 - DNA, 40 bp, synthetic construct
  source 1..40: mol_type = other DNA
ccgtgtacttcttctcgcgtggagtagacgaccttggtgg

SEQ ID NO: 8566 - DNA, 40 bp, synthetic construct
  source 1..40: mol_type = other DNA
ggagtaaggcttgtctgtgccgggcagcagaatacttggc

SEQ ID NO: 8567 - DNA, 40 bp, synthetic construct
  source 1..40: mol_type = other DNA
gtccacgggagttgaggacccatggaggccattgttcagc

SEQ ID NO: 8568 - DNA, 40 bp, synthetic construct
  source 1..40: mol_type = other DNA
gtcacagtgatgggatcagatggagacttctacagggacc

SEQ ID NO: 8569 - DNA, 40 bp, synthetic construct
  source 1..40: mol_type = other DNA
gagagtagagagggttcgcaaggaaggacaattcccttcg

SEQ ID NO: 8570 - DNA, 40 bp, synthetic construct
  source 1..40: mol_type = other DNA
catttcttatagcttggcctagccgagtttctgttgactc

SEQ ID NO: 8571 - DNA, 40 bp, synthetic construct
  source 1..40: mol_type = other DNA
cgtcttagaagaaagatcccacctgaggttcaaatgtgtc

SEQ ID NO: 8572 - DNA, 40 bp, synthetic construct
  source 1..40: mol_type = other DNA
gatctcacgtccataggtactcgagaagctctgtcacttg

SEQ ID NO: 8573 - DNA, 40 bp, synthetic construct
  source 1..40: mol_type = other DNA
cagatatgccttgatggaagtgggagtacgagtggattgt

SEQ ID NO: 8574 - DNA, 40 bp, synthetic construct
  source 1..40: mol_type = other DNA
acttgtcctgctacgcacattggtcatcctcagtctgaac

SEQ ID NO: 8575 - DNA, 40 bp, synthetic construct
  source 1..40: mol_type = other DNA
cccttcttcattgttggagagccatccgaactaatttcac

SEQ ID NO: 8576 - DNA, 40 bp, synthetic construct
  source 1..40: mol_type = other DNA
cgtttcttgtaatcttgtggtggtcagctcaactgaaagc

SEQ ID NO: 8577 - DNA, 40 bp, synthetic construct
  source 1..40: mol_type = other DNA
acaagagcctctataccacccagcccgaaggacagtacgc

SEQ ID NO: 8578 - DNA, 40 bp, synthetic construct
  source 1..40: mol_type = other DNA
gccaggtgtaatttttcaaggggaaggcttaaacgcagct

SEQ ID NO: 8579 - DNA, 40 bp, synthetic construct
  source 1..40: mol_type = other DNA
ctgaagaatccaactccactacatcaatgcacttggtgat

SEQ ID NO: 8580 - DNA, 40 bp, synthetic construct
  source 1..40: mol_type = other DNA
gtgaactcatcccagccagaattcactggtgacatgtttg

SEQ ID NO: 8581 - DNA, 40 bp, synthetic construct
  source 1..40: mol_type = other DNA
cagaacctgcgtcttcgaccacttggtagctgatccagtc

SEQ ID NO: 8582 - DNA, 40 bp, synthetic construct
  source 1..40: mol_type = other DNA
atccacacgggtaagttcattccctgccggagttgccaga

SEQ ID NO: 8583 - DNA, 40 bp, synthetic construct
  source 1..40: mol_type = other DNA
tcgcagtcaggatcataaagccttaaagagcccgctctca

SEQ ID NO: 8584 - DNA, 40 bp, synthetic construct
  source 1..40: mol_type = other DNA
aggagcgctgctctgaagcctgagacttccttttaaccgg

SEQ ID NO: 8585 - DNA, 40 bp, synthetic construct
  source 1..40: mol_type = other DNA
aaggttgtgtaatctgggacgccaatcaccaactgtcgtg

SEQ ID NO: 8586 - DNA, 40 bp, synthetic construct
  source 1..40: mol_type = other DNA
cgaaagtccagccggctgctcatccaaaagtccaagagtc

SEQ ID NO: 8587 - DNA, 40 bp, synthetic construct
  source 1..40: mol_type = other DNA
gcaatagagctccctcttcatgccggagaaactcatggtg

SEQ ID NO: 8588 - DNA, 40 bp, synthetic construct
  source 1..40: mol_type = other DNA
caaatacatgttgagcaccaattgagtacctactatgcac

SEQ ID NO: 8589 - DNA, 40 bp, synthetic construct
  source 1..40: mol_type = other DNA
aaccaggatggccagttaatcaacaacctgatctctgcaa

SEQ ID NO: 8590 - DNA, 40 bp, synthetic construct
  source 1..40: mol_type = other DNA
cagtgtctcagtttggatctctactataaggacgaagcct

SEQ ID NO: 8591 - DNA, 40 bp, synthetic construct
  source 1..40: mol_type = other DNA
tctgagttcaagttgcctcgtggcgtctccgctgtagtgt

SEQ ID NO: 8592 - DNA, 40 bp, synthetic construct
  source 1..40: mol_type = other DNA
ggcctgggatatcagccatgcattcctcttgtgaagacgt

SEQ ID NO: 8593 - DNA, 40 bp, synthetic construct
  source 1..40: mol_type = other DNA
catcggttattttgcatcacgatgcgccctttttgtaggg

SEQ ID NO: 8594 - DNA, 40 bp, synthetic construct
  source 1..40: mol_type = other DNA
aaccagaaaaatctccacactccatatccactccaatcaa

SEQ ID NO: 8595 - DNA, 40 bp, synthetic construct
  source 1..40: mol_type = other DNA
gatctgaatctcccgctgaatcactgtgcagtgctttgag

SEQ ID NO: 8596 - DNA, 40 bp, synthetic construct
  source 1..40: mol_type = other DNA
tctacgatttctggaaagtcgggcctgcttgatgctaatg

SEQ ID NO: 8597 - DNA, 40 bp, synthetic construct
  source 1..40: mol_type = other DNA
gtctgtctcactgggtttgcctgagtccgtttatttggcg

SEQ ID NO: 8598 - DNA, 40 bp, synthetic construct
  source 1..40: mol_type = other DNA
cattttgcagttgagcatccaatttgcaggacacaccgag

SEQ ID NO: 8599 - DNA, 40 bp, synthetic construct
  source 1..40: mol_type = other DNA
catagttcaccgtgtgtctggccgcctgtgagatcgctcc

SEQ ID NO: 8600 - DNA, 40 bp, synthetic construct
  source 1..40: mol_type = other DNA
aacaaactggatgggattgttgttgaaaagcagatctccc

SEQ ID NO: 8601 - DNA, 40 bp, synthetic construct
  source 1..40: mol_type = other DNA
gggaatgtatgtcagagcgtaggccagtgaatgctccctt

SEQ ID NO: 8602 - DNA, 40 bp, synthetic construct
  source 1..40: mol_type = other DNA
ggcatcagatgccttcatcagagatgactgaacagatgaa

SEQ ID NO: 8603 - DNA, 40 bp, synthetic construct
  source 1..40: mol_type = other DNA
gagtgtgcattaccagagacgattttcttcaggacaggtg

SEQ ID NO: 8604 - DNA, 40 bp, synthetic construct
  source 1..40: mol_type = other DNA
gtgggccacattttctaaactgatagtaaccaggcgtctc

SEQ ID NO: 8605 - DNA, 40 bp, synthetic construct
  source 1..40: mol_type = other DNA
gtgttttccttccaagcccagggaatttgctttggaaagg

SEQ ID NO: 8606 - DNA, 40 bp, synthetic construct
  source 1..40: mol_type = other DNA
ctttggtgcacttgttcacagttcatttgcgacttcgttc

SEQ ID NO: 8607 - DNA, 40 bp, synthetic construct
  source 1..40: mol_type = other DNA
atgatcaatgcgagcagcagggctgaataagatgattagg

SEQ ID NO: 8608 - DNA, 40 bp, synthetic construct
  source 1..40: mol_type = other DNA
tgctgggatcttccagagagcagctcttggtagtagtcgg

SEQ ID NO: 8609 - DNA, 40 bp, synthetic construct
  source 1..40: mol_type = other DNA
tgcaccagagtagaagctgaccctggcagaggtgccgttg

SEQ ID NO: 8610 - DNA, 40 bp, synthetic construct
  source 1..40: mol_type = other DNA
catcgaaggtggtgatgtgggtggaaggtgtacgtcttcc

SEQ ID NO: 8611 - DNA, 40 bp, synthetic construct
  source 1..40: mol_type = other DNA
cttggtgcagccggcgtacgcaatgattcatgaggacggt

SEQ ID NO: 8612 - DNA, 40 bp, synthetic construct
  source 1..40: mol_type = other DNA
cgctggtcttccggtcccagctggtgcagtcggatgaaca

SEQ ID NO: 8613 - DNA, 40 bp, synthetic construct
  source 1..40: mol_type = other DNA
aggtgacgctcacgcccaggctggaagacttggccattga

SEQ ID NO: 8614 - DNA, 40 bp, synthetic construct
  source 1..40: mol_type = other DNA
catgttcccgttgaagttgccgcgtctcgaagtcgtcctt

SEQ ID NO: 8615 - DNA, 40 bp, synthetic construct
  source 1..40: mol_type = other DNA
tcaccttcccgtcaaagttcctcactgacaaactcgttgg

SEQ ID NO: 8616 - DNA, 40 bp, synthetic construct
  source 1..40: mol_type = other DNA
agagaagttgccattgatgcgcggacggttcgtgtttgaa

SEQ ID NO: 8617 - DNA, 40 bp, synthetic construct
  source 1..40: mol_type = other DNA
aagcgtctgaacgaaggagaggttgggataagcccttgca

SEQ ID NO: 8618 - DNA, 40 bp, synthetic construct
  source 1..40: mol_type = other DNA
cacagaaaatctgagaaagccagcgacagacaggtccttt

SEQ ID NO: 8619 - DNA, 40 bp, synthetic construct
  source 1..40: mol_type = other DNA
tgcttttgagggccgccgccggagaagcagaaggaacaag

SEQ ID NO: 8620 - DNA, 40 bp, synthetic construct
  source 1..40: mol_type = other DNA
gtccaggtctatgggaaccccttttccgcgagtccggcgg

SEQ ID NO: 8621 - DNA, 40 bp, synthetic construct
  source 1..40: mol_type = other DNA
taccttccgattccttgtgcgctggtgttccagtaatggt

SEQ ID NO: 8622 - DNA, 40 bp, synthetic construct
  source 1..40: mol_type = other DNA
gattttcattcctgccatcaagtagcatgcatacaagctg

SEQ ID NO: 8623 - DNA, 40 bp, synthetic construct
  source 1..40: mol_type = other DNA
ttcacgatggctttgctatctcccggtagcagcaagggtc

SEQ ID NO: 8624 - DNA, 40 bp, synthetic construct
  source 1..40: mol_type = other DNA
atccaatcacccacatgcatcgcccatgttttcaaagagc

SEQ ID NO: 8625 - DNA, 40 bp, synthetic construct
  source 1..40: mol_type = other DNA
ctatgcacctaaacattgctagatctctagtgtggtagaa

SEQ ID NO: 8626 - DNA, 40 bp, synthetic construct
  source 1..40: mol_type = other DNA
agccggtgaaattggaaaacggtcccacggtcatccacgg

SEQ ID NO: 8627 - DNA, 40 bp, synthetic construct
  source 1..40: mol_type = other DNA
ccgcaacttgccactgtcggggagcttgcaactgcagtag

SEQ ID NO: 8628 - DNA, 40 bp, synthetic construct
  source 1..40: mol_type = other DNA
ctgtcgtttgtattcagcaacaggcgaacatagtcgggtt

SEQ ID NO: 8629 - DNA, 40 bp, synthetic construct
  source 1..40: mol_type = other DNA
ggttgcttctgagcacaggggcaccagcaatattccaccc

SEQ ID NO: 8630 - DNA, 40 bp, synthetic construct
  source 1..40: mol_type = other DNA
cagggctttgagtctcgatcccgccttaaagacgtagcac

SEQ ID NO: 8631 - DNA, 40 bp, synthetic construct
  source 1..40: mol_type = other DNA
cactgcagggaatgaacagcggctttatttacaatgccga

SEQ ID NO: 8632 - DNA, 40 bp, synthetic construct
  source 1..40: mol_type = other DNA
taaaaaattccctagcggcttcgtacacctactagaaagt

SEQ ID NO: 8633 - DNA, 40 bp, synthetic construct
  source 1..40: mol_type = other DNA
gtctggcattctggcttcaggatggaatagtgtctgcgct

SEQ ID NO: 8634 - DNA, 40 bp, synthetic construct
  source 1..40: mol_type = other DNA
ctatgagcagcttcccatcaggctctgtggtataaagtgc

SEQ ID NO: 8635 - DNA, 40 bp, synthetic construct
  source 1..40: mol_type = other DNA
ctaagatggttcagcaggcatacagagggtgtgagtgacc

SEQ ID NO: 8636 - DNA, 40 bp, synthetic construct
  source 1..40: mol_type = other DNA
actaagcctaggcgaggaccaacaaaacccacatggtagc

SEQ ID NO: 8637 - DNA, 40 bp, synthetic construct
  source 1..40: mol_type = other DNA
cgtggaatcggctacatcccctgagagtgctgcgagcatc

SEQ ID NO: 8638 - DNA, 40 bp, synthetic construct
  source 1..40: mol_type = other DNA
aacatgcccagggcacccacagggcaccagcaggcgttgc

SEQ ID NO: 8639 - DNA, 40 bp, synthetic construct
  source 1..40: mol_type = other DNA
gaacttggtgcctcctgcctgatcctccaaacatgaggta

SEQ ID NO: 8640 - DNA, 40 bp, synthetic construct
  source 1..40: mol_type = other DNA
gtacttagccagttttaccgtccgaatccattcgacgata

SEQ ID NO: 8641 - DNA, 40 bp, synthetic construct
  source 1..40: mol_type = other DNA
gttcacgatgtccttgaagcctgtcatggtgcatcagcat

SEQ ID NO: 8642 - DNA, 40 bp, synthetic construct
  source 1..40: mol_type = other DNA
aatgcccattggatggctaccgggttccaagcacccacac

SEQ ID NO: 8643 - DNA, 40 bp, synthetic construct
  source 1..40: mol_type = other DNA
cgcttttaccgcgacctgacgcaggatgtgtggtaacggg

SEQ ID NO: 8644 - DNA, 40 bp, synthetic construct
  source 1..40: mol_type = other DNA
atgtgctagtggtttttgtcatccacatcatagttgcgga

SEQ ID NO: 8645 - DNA, 40 bp, synthetic construct
  source 1..40: mol_type = other DNA
tagccaggattaacactgctttgaggtcaggctcacacag

SEQ ID NO: 8646 - DNA, 40 bp, synthetic construct
  source 1..40: mol_type = other DNA
ccagaccaggatctgtacagtgttcccacccatggacttg

SEQ ID NO: 8647 - DNA, 40 bp, synthetic construct
  source 1..40: mol_type = other DNA
tctctattactcctcggttcagtagtgatgtaaactcagg

SEQ ID NO: 8648 - DNA, 40 bp, synthetic construct
  source 1..40: mol_type = other DNA
agggcagaatagcaaaatacttacagggacaccgattaca

SEQ ID NO: 8649 - DNA, 40 bp, synthetic construct
  source 1..40: mol_type = other DNA
ttgaagttcgctgggtgcagcaggttgccacggcaggctt

SEQ ID NO: 8650 - DNA, 40 bp, synthetic construct
  source 1..40: mol_type = other DNA
gttggtaacacttcagctgagacaattcatggtgtggcta

SEQ ID NO: 8651 - DNA, 40 bp, synthetic construct
  source 1..40: mol_type = other DNA
ctgggtgactgaagtatgaagacaatgccagaataagaca

SEQ ID NO: 8652 - DNA, 40 bp, synthetic construct
  source 1..40: mol_type = other DNA
gtcatgttctctgttctctcgtgctgagctagaagtactt

SEQ ID NO: 8653 - DNA, 40 bp, synthetic construct
  source 1..40: mol_type = other DNA
cggctcgggttacacacgcagcagatcgaaacagatcggg

SEQ ID NO: 8654 - DNA, 40 bp, synthetic construct
  source 1..40: mol_type = other DNA
tgcagccacgaacactatgattgtgacaggcagacgtgat

SEQ ID NO: 8655 - DNA, 40 bp, synthetic construct
  source 1..40: mol_type = other DNA
agtgacgcaggagaatctcgtccatccttgttcacgtcgc

SEQ ID NO: 8656 - DNA, 40 bp, synthetic construct
  source 1..40: mol_type = other DNA
gcgtccggatcagcacccaaccctggctggcgcaatcttt

SEQ ID NO: 8657 - DNA, 40 bp, synthetic construct
  source 1..40: mol_type = other DNA
aagtcccatagatggtcgggattggctttgtgttggctac

SEQ ID NO: 8658 - DNA, 40 bp, synthetic construct
  source 1..40: mol_type = other DNA
tccatgacacttcgctggtgagccaacattatggaggata

SEQ ID NO: 8659 - DNA, 40 bp, synthetic construct
  source 1..40: mol_type = other DNA
gagaaccacgagttctcaccccacagtgtcaacctgagtg

SEQ ID NO: 8660 - DNA, 40 bp, synthetic construct
  source 1..40: mol_type = other DNA
tgcacattacttcagaaaccggagctgatgtaaggagtcc

SEQ ID NO: 8661 - DNA, 40 bp, synthetic construct
  source 1..40: mol_type = other DNA
ccatgaaggacgtgagcatgggtgttgtaatacagtccca

SEQ ID NO: 8662 - DNA, 40 bp, synthetic construct
  source 1..40: mol_type = other DNA
ccagcaactgcccactccgggccaagttttctcagaatcg

SEQ ID NO: 8663 - DNA, 40 bp, synthetic construct
  source 1..40: mol_type = other DNA
gatcatgccgatgatggccaggctttctgtggcgcagcca

SEQ ID NO: 8664 - DNA, 40 bp, synthetic construct
  source 1..40: mol_type = other DNA
gtcacaagcccatgtgtctgcagggttggttttcacgaat

SEQ ID NO: 8665 - DNA, 40 bp, synthetic construct
  source 1..40: mol_type = other DNA
gggaaaggaaggtccttccgggcacgttgaaattcacaac

SEQ ID NO: 8666 - DNA, 40 bp, synthetic construct
  source 1..40: mol_type = other DNA
acttcctttcggccacacacccgggcttgctcctgggtat

SEQ ID NO: 8667 - DNA, 40 bp, synthetic construct
  source 1..40: mol_type = other DNA
gggttcagacagcagctctggcatcattctccgtctggtt

SEQ ID NO: 8668 - DNA, 40 bp, synthetic construct
  source 1..40: mol_type = other DNA
tggtcggtgcagtcggcccatgcagttgagctcatcgctg

SEQ ID NO: 8669 - DNA, 40 bp, synthetic construct
  source 1..40: mol_type = other DNA
cttttgcaggatcagcgcgcttgatgacgcggatctcacc

SEQ ID NO: 8670 - DNA, 40 bp, synthetic construct
  source 1..40: mol_type = other DNA
tcttcttgtgtctgctgagcattggttaaagagctcgggc

SEQ ID NO: 8671 - DNA, 40 bp, synthetic construct
  source 1..40: mol_type = other DNA
ttgttcctatggtggcttccttccttgccaaacaggtcgc

SEQ ID NO: 8672 - DNA, 40 bp, synthetic construct
  source 1..40: mol_type = other DNA
tatgggaggaatgtagttgcgccagtattgagcagcattc

SEQ ID NO: 8673 - DNA, 40 bp, synthetic construct
  source 1..40: mol_type = other DNA
acatctgcaccaaggcaaggcagatgtgtttgtgggactc

SEQ ID NO: 8674 - DNA, 40 bp, synthetic construct
  source 1..40: mol_type = other DNA
aacctcagaaagtctcaggcacgcagcagaaataaagcac

SEQ ID NO: 8675 - DNA, 40 bp, synthetic construct
  source 1..40: mol_type = other DNA
ccacccaaggcatcattcgtacaacatgcaatcgtgttgc

SEQ ID NO: 8676 - DNA, 40 bp, synthetic construct
  source 1..40: mol_type = other DNA
tactggcagttgtcccgttctctggtccacattgtagacg

SEQ ID NO: 8677 - DNA, 40 bp, synthetic construct
  source 1..40: mol_type = other DNA
acggagtttgtggtgtatgacagcctttctggagtataca

SEQ ID NO: 8678 - DNA, 40 bp, synthetic construct
  source 1..40: mol_type = other DNA
ttcgccttcagttttggaagtcggcaaggcaatgtattaa

SEQ ID NO: 8679 - DNA, 40 bp, synthetic construct
  source 1..40: mol_type = other DNA
gggcttccttcagtattttcgttccacaccatcttcttga

SEQ ID NO: 8680 - DNA, 40 bp, synthetic construct
  source 1..40: mol_type = other DNA
tacatgtccacataactacgcatccaacttgtccttcaaa

SEQ ID NO: 8681 - DNA, 40 bp, synthetic construct
  source 1..40: mol_type = other DNA
aggacggatggaaaaacctgggtgataagtaaccagccac

SEQ ID NO: 8682 - DNA, 40 bp, synthetic construct
  source 1..40: mol_type = other DNA
tctgaagcgccaagagaagcccagtttttgaacagcctcc

SEQ ID NO: 8683 - DNA, 40 bp, synthetic construct
  source 1..40: mol_type = other DNA
ctagacaggcacataattcattggcatggtctctgcttat

SEQ ID NO: 8684 - DNA, 40 bp, synthetic construct
  source 1..40: mol_type = other DNA
gaaccagttcttccatctgtgagagagttgggatgtttgt

SEQ ID NO: 8685 - DNA, 40 bp, synthetic construct
  source 1..40: mol_type = other DNA
aagttcatgagggcccgggcgaccacagcggttattatgt

SEQ ID NO: 8686 - DNA, 40 bp, synthetic construct
  source 1..40: mol_type = other DNA
ggtggcacggcgatagccttaagtagacaagatcagtccg

SEQ ID NO: 8687 - DNA, 40 bp, synthetic construct
  source 1..40: mol_type = other DNA
aagctgtcaaccttctgcttgctctcttgagatcttactg

SEQ ID NO: 8688 - DNA, 40 bp, synthetic construct
  source 1..40: mol_type = other DNA
gtctgccatcttatacacagccgtggcatttgcaggctac

SEQ ID NO: 8689 - DNA, 40 bp, synthetic construct
  source 1..40: mol_type = other DNA
agtgctagtttcctgtatctggtactgtttttgactgttc

SEQ ID NO: 8690 - DNA, 40 bp, synthetic construct
  source 1..40: mol_type = other DNA
cgatgtgtttagtcaagttcatttccatctgtgtgcaact

SEQ ID NO: 8691 - DNA, 40 bp, synthetic construct
  source 1..40: mol_type = other DNA
ggtgaacacctccttcatgtgtgaggccggtgcagaagcg

SEQ ID NO: 8692 - DNA, 40 bp, synthetic construct
  source 1..40: mol_type = other DNA
tagcatcatgcgcaacagtggacgtgaactggaagattcc

SEQ ID NO: 8693 - DNA, 40 bp, synthetic construct
  source 1..40: mol_type = other DNA
aactgcttgtagctcctcttaggcttgaaaggtggctcgt

SEQ ID NO: 8694 - DNA, 40 bp, synthetic construct
  source 1..40: mol_type = other DNA
gcaaaatagtcctcacaatctcgacttgtacagacgttca

SEQ ID NO: 8695 - DNA, 40 bp, synthetic construct
  source 1..40: mol_type = other DNA
catcagcatcaaattgcgctcttcatggcagcacgaagtt

SEQ ID NO: 8696 - DNA, 40 bp, synthetic construct
  source 1..40: mol_type = other DNA
ccacctttggatgacttcacggctcaccgctgatccggga

SEQ ID NO: 8697 - DNA, 40 bp, synthetic construct
  source 1..40: mol_type = other DNA
caaccaattggtttcttctcgccaggaaatatcagtgtcc

SEQ ID NO: 8698 - DNA, 40 bp, synthetic construct
  source 1..40: mol_type = other DNA
aacccaggctaaccgactgcctgttcagtttgccttatct

SEQ ID NO: 8699 - DNA, 40 bp, synthetic construct
  source 1..40: mol_type = other DNA
cctttactttgtctcctttcagtgaatcctccatagtgag

SEQ ID NO: 8700 - DNA, 40 bp, synthetic construct
  source 1..40: mol_type = other DNA
cctgtccgttggaactcaggaaggacacttgaactccctg

SEQ ID NO: 8701 - DNA, 40 bp, synthetic construct
  source 1..40: mol_type = other DNA
ggagttcgggagaacactgccatggagcataagaaaaagc

SEQ ID NO: 8702 - DNA, 40 bp, synthetic construct
  source 1..40: mol_type = other DNA
tattaggcacaagctggcccctctgctggtctcaaccttc

SEQ ID NO: 8703 - DNA, 40 bp, synthetic construct
  source 1..40: mol_type = other DNA
tagcatgagatccaacaggcaggttgagggctgctcacct

SEQ ID NO: 8704 - DNA, 40 bp, synthetic construct
  source 1..40: mol_type = other DNA
gtcctattcatggtcaggaccagaaaagacattgacgttg

SEQ ID NO: 8705 - DNA, 40 bp, synthetic construct
  source 1..40: mol_type = other DNA
ccgtctgacgtcagaggcacgccagggaatgacccaaaaa

SEQ ID NO: 8706 - DNA, 40 bp, synthetic construct
  source 1..40: mol_type = other DNA
accagagggttgggagaggagagcccaagttgaatcacca

SEQ ID NO: 8707 - DNA, 40 bp, synthetic construct
  source 1..40: mol_type = other DNA
caaattcgcctagcgtgagaacacacactatgtgtttgga

SEQ ID NO: 8708 - DNA, 40 bp, synthetic construct
  source 1..40: mol_type = other DNA
ttagactactgtcaggtacaagtccctaaactctctcatc

SEQ ID NO: 8709 - DNA, 40 bp, synthetic construct
  source 1..40: mol_type = other DNA
accgggatcacatataatccccacttttatggcacgtcac

SEQ ID NO: 8710 - DNA, 40 bp, synthetic construct
  source 1..40: mol_type = other DNA
tggatcaaccatgtgcagttttcctttgaagcctacacag

SEQ ID NO: 8711 - DNA, 40 bp, synthetic construct
  source 1..40: mol_type = other DNA
catggtactgtctcctggcttggcctttgttcaggtacgt

SEQ ID NO: 8712 - DNA, 40 bp, synthetic construct
  source 1..40: mol_type = other DNA
cctgattttccgctcagctcctttgctttcgttcttcatc

SEQ ID NO: 8713 - DNA, 40 bp, synthetic construct
  source 1..40: mol_type = other DNA
ggagtggagtatcatgggtgcagggtaggttgagctgctg

SEQ ID NO: 8714 - DNA, 40 bp, synthetic construct
  source 1..40: mol_type = other DNA
cggtcccgctcattctggacttgaccttcgagtgctgatc

SEQ ID NO: 8715 - DNA, 40 bp, synthetic construct
  source 1..40: mol_type = other DNA
ccatatgttcctgcatcaggggcaacgatgacgttggttc

SEQ ID NO: 8716 - DNA, 40 bp, synthetic construct
  source 1..40: mol_type = other DNA
aatgccttacgcatgcaaactttcagatttctttggtgcg

SEQ ID NO: 8717 - DNA, 40 bp, synthetic construct
  source 1..40: mol_type = other DNA
tgtgttcgcctcttgacatttctggcgctccaagacgttg

SEQ ID NO: 8718 - DNA, 40 bp, synthetic construct
  source 1..40: mol_type = other DNA
ggttgcatttgatcatgcatagactcagccaaggttgtga

SEQ ID NO: 8719 - DNA, 40 bp, synthetic construct
  source 1..40: mol_type = other DNA
aagataggcgagtctaagagaatgcacagcatgactacct

SEQ ID NO: 8720 - DNA, 40 bp, synthetic construct
  source 1..40: mol_type = other DNA
ttactgcacaggcgttgccagggtcatcaagcagtaacgg

SEQ ID NO: 8721 - DNA, 40 bp, synthetic construct
  source 1..40: mol_type = other DNA
tggccttgaacaggtcatccgtcttcacggatactcagaa

SEQ ID NO: 8722 - DNA, 40 bp, synthetic construct
  source 1..40: mol_type = other DNA
ggtactcaggaatctccttggtagcgctgcacgatcttcc

SEQ ID NO: 8723 - DNA, 40 bp, synthetic construct
  source 1..40: mol_type = other DNA
tgcgtacttctccatctgaaccatcgttgatggcttgacg

SEQ ID NO: 8724 - DNA, 40 bp, synthetic construct
  source 1..40: mol_type = other DNA
ttctctgtaactttctcgggagcttttgcttgcgtttgtt

SEQ ID NO: 8725 - DNA, 40 bp, synthetic construct
  source 1..40: mol_type = other DNA
attgtgaggtcgccagtctgcagatcgctggacattagta

SEQ ID NO: 8726 - DNA, 40 bp, synthetic construct
  source 1..40: mol_type = other DNA
tacacagacatagactcctttctccaaggtaattccttgc

SEQ ID NO: 8727 - DNA, 40 bp, synthetic construct
  source 1..40: mol_type = other DNA
gtaacatcagtgacctgcggacaaggtgacactgttctta

SEQ ID NO: 8728 - DNA, 40 bp, synthetic construct
  source 1..40: mol_type = other DNA
ataaatggctccatctgagagtagtgaagtcaatgctact

SEQ ID NO: 8729 - DNA, 40 bp, synthetic construct
  source 1..40: mol_type = other DNA
catcagagttgctctgttccggtggttgtagtaatctcta

SEQ ID NO: 8730 - DNA, 40 bp, synthetic construct
  source 1..40: mol_type = other DNA
ggaaacggagttactgctgcacaccatgggcaccagtgtc

SEQ ID NO: 8731 - DNA, 40 bp, synthetic construct
  source 1..40: mol_type = other DNA
taccgctcaagtccaaaatcgtagaacttgggatacgatg

SEQ ID NO: 8732 - DNA, 40 bp, synthetic construct
  source 1..40: mol_type = other DNA
gagtgaaattcagggtctacccctcagaaccttttagaga

SEQ ID NO: 8733 - DNA, 40 bp, synthetic construct
  source 1..40: mol_type = other DNA
gcaagggttcaaagacccaactgacgcacacctattgcaa

SEQ ID NO: 8734 - DNA, 40 bp, synthetic construct
  source 1..40: mol_type = other DNA
gtaaactaacccttaactgctacctagaatgtggctgatt

SEQ ID NO: 8735 - DNA, 40 bp, synthetic construct
  source 1..40: mol_type = other DNA
caggcccacaggatattcatgaggccaccagaaaataaac

SEQ ID NO: 8736 - DNA, 40 bp, synthetic construct
  source 1..40: mol_type = other DNA
cttcagaattcctccatgggggtactcaaggagacaatgg

SEQ ID NO: 8737 - DNA, 40 bp, synthetic construct
  source 1..40: mol_type = other DNA
tctataaaagggcacagtctctccaaagagaacatgtacc

SEQ ID NO: 8738 - DNA, 40 bp, synthetic construct
  source 1..40: mol_type = other DNA
tccctgtaagtcctttaagggctgcttattttgccggctg

SEQ ID NO: 8739 - DNA, 40 bp, synthetic construct
  source 1..40: mol_type = other DNA
tccgcgtttgctccgctgttggcttccacatcagttaact

SEQ ID NO: 8740 - DNA, 40 bp, synthetic construct
  source 1..40: mol_type = other DNA
catcattatggccttgctggtccaaagagaaatctcacga

SEQ ID NO: 8741 - DNA, 40 bp, synthetic construct
  source 1..40: mol_type = other DNA
tttctgggaccttctttactatatggagctaagttagctc

SEQ ID NO: 8742 - DNA, 40 bp, synthetic construct
  source 1..40: mol_type = other DNA
tctagctgaaaccgtgggcctaggcctggccaaatcattg

SEQ ID NO: 8743 - DNA, 40 bp, synthetic construct
  source 1..40: mol_type = other DNA
ccaaggtcaggcagtaagtcgccctgatatagggacgatt

SEQ ID NO: 8744 - DNA, 40 bp, synthetic construct
  source 1..40: mol_type = other DNA
gcatgtcagacccagggtgcgctcgagggcttttcctgcc

SEQ ID NO: 8745 - DNA, 40 bp, synthetic construct
  source 1..40: mol_type = other DNA
ttggagacattctacagagagctcagtttcttcttcaatc

SEQ ID NO: 8746 - DNA, 40 bp, synthetic construct
  source 1..40: mol_type = other DNA
gtagtaacagggtacggaacgataaaacagaccaactgtg

SEQ ID NO: 8747 - DNA, 40 bp, synthetic construct
  source 1..40: mol_type = other DNA
caaatggcacagatgacattggtcatagcgccggccaaag

SEQ ID NO: 8748 - DNA, 40 bp, synthetic construct
  source 1..40: mol_type = other DNA
gggatgaagtcagctgggtttgggtaggtagcgaagaata

SEQ ID NO: 8749 - DNA, 40 bp, synthetic construct
  source 1..40: mol_type = other DNA
ggtattccatcatctcctgcgtaggactggatctggtgtc

SEQ ID NO: 8750 - DNA, 40 bp, synthetic construct
  source 1..40: mol_type = other DNA
tgagtacgttttgacacaactcaccactccttttggcttt

SEQ ID NO: 8751 - DNA, 40 bp, synthetic construct
  source 1..40: mol_type = other DNA
catgagcatgatatggcagaaggccttgcttgcggacgcc

SEQ ID NO: 8752 - DNA, 40 bp, synthetic construct
  source 1..40: mol_type = other DNA
tctctgcagaagaactcctggaggaggaaagatagcgcca

SEQ ID NO: 8753 - DNA, 40 bp, synthetic construct
  source 1..40: mol_type = other DNA
ggcagcattctctttcacaattcctcattacgggagaccc

SEQ ID NO: 8754 - DNA, 40 bp, synthetic construct
  source 1..40: mol_type = other DNA
atcacgaaaatagagccttctgttggctgtgtgttgaaca

SEQ ID NO: 8755 - DNA, 40 bp, synthetic construct
  source 1..40: mol_type = other DNA
cacttcttgcttggaggatatccttagatggcaagtaaca

SEQ ID NO: 8756 - DNA, 40 bp, synthetic construct
  source 1..40: mol_type = other DNA
gcagcgagcagtccttctgatttggattccgtagcatatg

SEQ ID NO: 8757 - DNA, 40 bp, synthetic construct
  source 1..40: mol_type = other DNA
acacagacatttgaagctgcgacaaggaaaacccttctgg

SEQ ID NO: 8758 - DNA, 40 bp, synthetic construct
  source 1..40: mol_type = other DNA
cactggcactggaaagacccccacctcatagccttcattg

SEQ ID NO: 8759 - DNA, 40 bp, synthetic construct
  source 1..40: mol_type = other DNA
ttcttgtgtcggccgatcagcaccaagcaggttgatgatg

SEQ ID NO: 8760 - DNA, 40 bp, synthetic construct
  source 1..40: mol_type = other DNA
cctcgataatctcattgccctgaacgccatgccatgggag

SEQ ID NO: 8761 - DNA, 40 bp, synthetic construct
  source 1..40: mol_type = other DNA
gtcccattcgttgtaagaagactatcacttcctctaaggg

SEQ ID NO: 8762 - DNA, 40 bp, synthetic construct
  source 1..40: mol_type = other DNA
gcagctctgagtacaggtccggcaccgcggtagtacaggc

SEQ ID NO: 8763 - DNA, 40 bp, synthetic construct
  source 1..40: mol_type = other DNA
ggttcaaaacgaaagcaagttttcaggcgattacaagggc

SEQ ID NO: 8764 - DNA, 40 bp, synthetic construct
  source 1..40: mol_type = other DNA
tttgtcttcctcttcgtctaagtttggaagcgactgtagg

SEQ ID NO: 8765 - DNA, 40 bp, synthetic construct
  source 1..40: mol_type = other DNA
cgcaagtgatgcccggcgcacagacggactttctgcggcg

SEQ ID NO: 8766 - DNA, 40 bp, synthetic construct
  source 1..40: mol_type = other DNA
ggccctcattctagttcctttctggtgtagtataatcagg

SEQ ID NO: 8767 - DNA, 40 bp, synthetic construct
  source 1..40: mol_type = other DNA
agagatcctcattatcctgaccattattggccttagatcc

SEQ ID NO: 8768 - DNA, 40 bp, synthetic construct
  source 1..40: mol_type = other DNA
aaggtcaactgggttgccggggtctggaaagcgtcaatta

SEQ ID NO: 8769 - DNA, 40 bp, synthetic construct
  source 1..40: mol_type = other DNA
tcgtagtctaaggtcatgtgggcatcatatagttcttgag

SEQ ID NO: 8770 - DNA, 40 bp, synthetic construct
  source 1..40: mol_type = other DNA
gggccacatcctgtcccaccctccatccagttgataaacc

SEQ ID NO: 8771 - DNA, 40 bp, synthetic construct
  source 1..40: mol_type = other DNA
ccacggtgccatacagagaatgggatgttctcactctcgg

SEQ ID NO: 8772 - DNA, 40 bp, synthetic construct
  source 1..40: mol_type = other DNA
tgagataaacgcagatactgcactatcagccagttcgttg

SEQ ID NO: 8773 - DNA, 40 bp, synthetic construct
  source 1..40: mol_type = other DNA
ctcaagtcaaggtattcgaggtctggctatctgattgaag

SEQ ID NO: 8774 - DNA, 40 bp, synthetic construct
  source 1..40: mol_type = other DNA
cggaaaagattatgccagcaattatactccgtgggccaac

SEQ ID NO: 8775 - DNA, 40 bp, synthetic construct
  source 1..40: mol_type = other DNA
ccctcttttcttctttactcgatcactacttaggcgcttt

SEQ ID NO: 8776 - DNA, 40 bp, synthetic construct
  source 1..40: mol_type = other DNA
acgggttgggagggtggttcctccgtccctgcagttccta

SEQ ID NO: 8777 - DNA, 40 bp, synthetic construct
  source 1..40: mol_type = other DNA
gtcagcagtatgattgtgggcagtgaacctccgactgtat

SEQ ID NO: 8778 - DNA, 40 bp, synthetic construct
  source 1..40: mol_type = other DNA
accagcaatcaatcctgtgagctgttgatattgagacaac

SEQ ID NO: 8779 - DNA, 40 bp, synthetic construct
  source 1..40: mol_type = other DNA
tcagaaagagcagcatcgataggtttttccagtgttttcc

SEQ ID NO: 8780 - DNA, 40 bp, synthetic construct
  source 1..40: mol_type = other DNA
gaagggatttgtgcgcatgtttgagctcaacttccgggta

SEQ ID NO: 8781 - DNA, 40 bp, synthetic construct
  source 1..40: mol_type = other DNA
tccttacatcattcacagtcttctagggaggagtaagtgt

SEQ ID NO: 8782 - DNA, 40 bp, synthetic construct
  source 1..40: mol_type = other DNA
cactgtatccaggacagcactcttagttgacatttcggcc

SEQ ID NO: 8783 - DNA, 40 bp, synthetic construct
  source 1..40: mol_type = other DNA
ttgtagaatacagggtgtggggagcaaaacaccaaagaag

SEQ ID NO: 8784 - DNA, 40 bp, synthetic construct
  source 1..40: mol_type = other DNA
gagcttctggcaattgcagtatgacgtccaggtctaaata

SEQ ID NO: 8785 - DNA, 40 bp, synthetic construct
  source 1..40: mol_type = other DNA
gtagacacgttgagcttctgcctccagctggcgcagcttc

SEQ ID NO: 8786 - DNA, 40 bp, synthetic construct
  source 1..40: mol_type = other DNA
gattgacataatcagccgatagctccatttttcagggcaa

SEQ ID NO: 8787 - DNA, 40 bp, synthetic construct
  source 1..40: mol_type = other DNA
tgcttggctattgaagattgttcccgccaattattatggt

SEQ ID NO: 8788 - DNA, 40 bp, synthetic construct
  source 1..40: mol_type = other DNA
tcaactttttcaaccctgtggttcaggctgttactatgca

SEQ ID NO: 8789 - DNA, 40 bp, synthetic construct
  source 1..40: mol_type = other DNA
gtaatgaaagctggcagaggttcatttggaaggatagagg

SEQ ID NO: 8790 - DNA, 40 bp, synthetic construct
  source 1..40: mol_type = other DNA
aaagccacgttggtgatcatctgtcctcaaagataccaga

SEQ ID NO: 8791 - DNA, 40 bp, synthetic construct
  source 1..40: mol_type = other DNA
aagtcaaggcctgtgcagctaggacaccggctgtcactct

SEQ ID NO: 8792 - DNA, 40 bp, synthetic construct
  source 1..40: mol_type = other DNA
cgagtagaaatacggttcattgtgctggttcatcagcatc

SEQ ID NO: 8793 - DNA, 40 bp, synthetic construct
  source 1..40: mol_type = other DNA
cattttgcaccgtccagtccctgcagggtcaggttcttcc

SEQ ID NO: 8794 - DNA, 40 bp, synthetic construct
  source 1..40: mol_type = other DNA
gccttttcctctgggacagacaattgtgaagtgtattggg

SEQ ID NO: 8795 - DNA, 40 bp, synthetic construct
  source 1..40: mol_type = other DNA
caccatatcatacagcaggatcgaaaggaatatctccaca

SEQ ID NO: 8796 - DNA, 40 bp, synthetic construct
  source 1..40: mol_type = other DNA
cggagttttactaaaggaggaaaaggaagaccagttcact

SEQ ID NO: 8797 - DNA, 40 bp, synthetic construct
  source 1..40: mol_type = other DNA
ttccgcagtgtctctggccagctcgagtgttggcagcaaa

SEQ ID NO: 8798 - DNA, 40 bp, synthetic construct
  source 1..40: mol_type = other DNA
gtggtggttttcaatgaaggcatacacaagagatggcacc

SEQ ID NO: 8799 - DNA, 40 bp, synthetic construct
  source 1..40: mol_type = other DNA
tgttgaagggcacagacatttctttttggtgcccaaaatc

SEQ ID NO: 8800 - DNA, 40 bp, synthetic construct
  source 1..40: mol_type = other DNA
atccttcttcagttccggagctctgttggtactacagctg

SEQ ID NO: 8801 - DNA, 40 bp, synthetic construct
  source 1..40: mol_type = other DNA
gctttatctggtgagacagattgatgcatgtttgcagaca

SEQ ID NO: 8802 - DNA, 40 bp, synthetic construct
  source 1..40: mol_type = other DNA
cagggttcttgcatcaagctggaggaaaacgccagtacaa

SEQ ID NO: 8803 - DNA, 40 bp, synthetic construct
  source 1..40: mol_type = other DNA
ctagctctggactgcttgatgattgtagcattgatctggc

SEQ ID NO: 8804 - DNA, 40 bp, synthetic construct
  source 1..40: mol_type = other DNA
acatccattgtaatctgagcagtctgggcttacatgacaa

SEQ ID NO: 8805 - DNA, 40 bp, synthetic construct
  source 1..40: mol_type = other DNA
ttgagtcaaacacatgggaaaggaccatagggtaataagt

SEQ ID NO: 8806 - DNA, 40 bp, synthetic construct
  source 1..40: mol_type = other DNA
aaatgaacccagcctctggcaccgtttattgtcgttacac

SEQ ID NO: 8807 - DNA, 40 bp, synthetic construct
  source 1..40: mol_type = other DNA
tgaaacccaccaggcacacacttcttcatgcggtacagca

SEQ ID NO: 8808 - DNA, 40 bp, synthetic construct
  source 1..40: mol_type = other DNA
caggatgatttgaaggtgaacttcctcacaggtgaagttg

SEQ ID NO: 8809 - DNA, 40 bp, synthetic construct
  source 1..40: mol_type = other DNA
tggcctcatcataagtcatacctttgctgacaataagcac

SEQ ID NO: 8810 - DNA, 40 bp, synthetic construct
  source 1..40: mol_type = other DNA
gtgcataccaaaacacacttcacagccacttaaggaacca

SEQ ID NO: 8811 - DNA, 40 bp, synthetic construct
  source 1..40: mol_type = other DNA
ttcccgggaacccacttttttcatcttctacactgcttag

SEQ ID NO: 8812 - DNA, 40 bp, synthetic construct
  source 1..40: mol_type = other DNA
ctagtgtcttcagcctgccgagaatgtacaggtcaggatt

SEQ ID NO: 8813 - DNA, 40 bp, synthetic construct
  source 1..40: mol_type = other DNA
gagggtactttctcctgaggggcagaggaagttggtaaaa

SEQ ID NO: 8814 - DNA, 40 bp, synthetic construct
  source 1..40: mol_type = other DNA
tacaatggctggagagttacagggatccacatcttcaaat

SEQ ID NO: 8815 - DNA, 40 bp, synthetic construct
  source 1..40: mol_type = other DNA
tattccaggatcttcttccactggtaatataacctcgaca

SEQ ID NO: 8816 - DNA, 40 bp, synthetic construct
  source 1..40: mol_type = other DNA
aggttgttgaggttgttgagcagaaactgacatgtcttgg

SEQ ID NO: 8817 - DNA, 40 bp, synthetic construct
  source 1..40: mol_type = other DNA
gaggcttggttttattgtgcggacacgaggacagattcca

SEQ ID NO: 8818 - DNA, 40 bp, synthetic construct
  source 1..40: mol_type = other DNA
aagctaatcgtgttcctggattcctatctggataggacac

SEQ ID NO: 8819 - DNA, 40 bp, synthetic construct
  source 1..40: mol_type = other DNA
agcggtaaagacccgcatcaaatcccgtacatgacgtcac

SEQ ID NO: 8820 - DNA, 40 bp, synthetic construct
  source 1..40: mol_type = other DNA
gaaggtgacgttgaatgaaatcctaagcaccggatagttg

SEQ ID NO: 8821 - DNA, 40 bp, synthetic construct
  source 1..40: mol_type = other DNA
gttggatacttgctggaaaaattgaagcagaaccaagttg

SEQ ID NO: 8822 - DNA, 40 bp, synthetic construct
  source 1..40: mol_type = other DNA
gttagcaagaaacttctgcactcgaatgtgcggacttttt

SEQ ID NO: 8823 - DNA, 40 bp, synthetic construct
  source 1..40: mol_type = other DNA
aagatgtgaccaaggtgatttgttttgtggagtgaatgtg

SEQ ID NO: 8824 - DNA, 40 bp, synthetic construct
  source 1..40: mol_type = other DNA
cactgcttgtctgtactgtcatcgtagtctatgccttttg

SEQ ID NO: 8825 - DNA, 40 bp, synthetic construct
  source 1..40: mol_type = other DNA
cacatctgttttggttctctacagccaaattcaggatgta

SEQ ID NO: 8826 - DNA, 40 bp, synthetic construct
  source 1..40: mol_type = other DNA
atagtctgaggattacacctttggaacccagatgaaaatg

SEQ ID NO: 8827 - DNA, 40 bp, synthetic construct
  source 1..40: mol_type = other DNA
caaacaccacacagctgtcccccagtgcatagttaagaca

SEQ ID NO: 8828 - DNA, 40 bp, synthetic construct
  source 1..40: mol_type = other DNA
ggttaccctggttttgacaggagtcatgacccatgtagga

SEQ ID NO: 8829 - DNA, 40 bp, synthetic construct
  source 1..40: mol_type = other DNA
gagggtgggttctcgggcacccatctgcttgaagaccatg

SEQ ID NO: 8830 - DNA, 40 bp, synthetic construct
  source 1..40: mol_type = other DNA
gtagaactgtggttcaagagaccctcaaaacatcccaggg

SEQ ID NO: 8831 - DNA, 40 bp, synthetic construct
  source 1..40: mol_type = other DNA
cccatttcttctctgggttgagagttgatgtactcccgaa

SEQ ID NO: 8832 - DNA, 40 bp, synthetic construct
  source 1..40: mol_type = other DNA
caaagcagcgcctcagaagcacctagagacttccttttga

SEQ ID NO: 8833 - DNA, 40 bp, synthetic construct
  source 1..40: mol_type = other DNA
ctccttctttgtcctgaagactgtcatttctgtctctagg

SEQ ID NO: 8834 - DNA, 40 bp, synthetic construct
  source 1..40: mol_type = other DNA
tgtggcctgaaagtagagcctctgaaaccttctttagcca

SEQ ID NO: 8835 - DNA, 40 bp, synthetic construct
  source 1..40: mol_type = other DNA
ccgaagcagagtttttaggactcttcttctcatttcgaca

SEQ ID NO: 8836 - DNA, 40 bp, synthetic construct
  source 1..40: mol_type = other DNA
ttgtagtgaagggaaggttttttggccaagcaatgaagtt

SEQ ID NO: 8837 - DNA, 40 bp, synthetic construct
  source 1..40: mol_type = other DNA
aagacccaggacttggccgcgcttgcaaaagtggacaccg

SEQ ID NO: 8838 - DNA, 40 bp, synthetic construct
  source 1..40: mol_type = other DNA
cttgttgcgctcaaagttgcgcgatgatcaccttgatggc

SEQ ID NO: 8839 - DNA, 40 bp, synthetic construct
  source 1..40: mol_type = other DNA
ctctaggttgagaccgccggtcgacgcgctttagaaacgg

SEQ ID NO: 8840 - DNA, 40 bp, synthetic construct
  source 1..40: mol_type = other DNA
tcgcagagacgtgcaccagcctcacaaggttctggcgtgg

SEQ ID NO: 8841 - DNA, 40 bp, synthetic construct
  source 1..40: mol_type = other DNA
catgtgtttgttgcctggattacagctacttagaaacagc

SEQ ID NO: 8842 - DNA, 40 bp, synthetic construct
  source 1..40: mol_type = other DNA
agccatatcggtccagtcccctttgcacttcacttcattg

SEQ ID NO: 8843 - DNA, 40 bp, synthetic construct
  source 1..40: mol_type = other DNA
ttacccacatatctctggcccaacaacagacccgtctcca

SEQ ID NO: 8844 - DNA, 40 bp, synthetic construct
  source 1..40: mol_type = other DNA
tgattgagtagatgacagacctgtgacgccttcatactga

SEQ ID NO: 8845 - DNA, 40 bp, synthetic construct
  source 1..40: mol_type = other DNA
catcacatgtaacttgcacagacatatctgcaccactgat

SEQ ID NO: 8846 - DNA, 40 bp, synthetic construct
  source 1..40: mol_type = other DNA
tttccatccatggcctgtgcaaaagcagagtagagagcgt

SEQ ID NO: 8847 - DNA, 40 bp, synthetic construct
  source 1..40: mol_type = other DNA
ttacagcaggagtgaagccaggtgacaacagaagccaaat

SEQ ID NO: 8848 - DNA, 40 bp, synthetic construct
  source 1..40: mol_type = other DNA
gttcagaggtgactggatccagcctgacatgtcagttcat

SEQ ID NO: 8849 - DNA, 40 bp, synthetic construct
  source 1..40: mol_type = other DNA
agggattctcaacccgtcttcaggaactgaccctcaaatt

SEQ ID NO: 8850 - DNA, 40 bp, synthetic construct
  source 1..40: mol_type = other DNA
agcacacgaaagccagggccgctctgtttgatctttctcc

SEQ ID NO: 8851 - DNA, 40 bp, synthetic construct
  source 1..40: mol_type = other DNA
atggtgcagttgcgaacgagcacactcagcattggcagtg

SEQ ID NO: 8852 - DNA, 40 bp, synthetic construct
  source 1..40: mol_type = other DNA
ccatatacaacacagacttcgaagctgctgggagtaattc

SEQ ID NO: 8853 - DNA, 40 bp, synthetic construct
  source 1..40: mol_type = other DNA
ctttgcttgactgagatgtgaaatgtctgtggataccaca

SEQ ID NO: 8854 - DNA, 40 bp, synthetic construct
  source 1..40: mol_type = other DNA
agatagatgtccagacctttctccacatatgccaatgatg

SEQ ID NO: 8855 - DNA, 40 bp, synthetic construct
  source 1..40: mol_type = other DNA
accctctgagaaagttttagtggtccacttgtgtgtgatg

SEQ ID NO: 8856 - DNA, 40 bp, synthetic construct
  source 1..40: mol_type = other DNA
ccgacctgtagaggatgtggcaagaatcagcctttggtcc

SEQ ID NO: 8857 - DNA, 40 bp, synthetic construct
  source 1..40: mol_type = other DNA
aaggttaaggagcttgtgtgagaagaaaatggagacatgg

SEQ ID NO: 8858 - DNA, 40 bp, synthetic construct
  source 1..40: mol_type = other DNA
tggttgaaaggtctgaaacatgttgcaaggctagtgctag

SEQ ID NO: 8859 - DNA, 40 bp, synthetic construct
  source 1..40: mol_type = other DNA
gctgaatggccgtttctggacagccaccacgtgttgtctt

SEQ ID NO: 8860 - DNA, 40 bp, synthetic construct
  source 1..40: mol_type = other DNA
taaactcccacaaggatgtctcctcatgtcgagccaagac

SEQ ID NO: 8861 - DNA, 40 bp, synthetic construct
  source 1..40: mol_type = other DNA
actggctcagatctcagatggagctaaaacaaccacagcg

SEQ ID NO: 8862 - DNA, 40 bp, synthetic construct
  source 1..40: mol_type = other DNA
tctataggtatcttgaagggacactctgtcctcaagttcc

SEQ ID NO: 8863 - DNA, 40 bp, synthetic construct
  source 1..40: mol_type = other DNA
agttggtaatggctgcttcttgagcaagaagggaaggtac

SEQ ID NO: 8864 - DNA, 40 bp, synthetic construct
  source 1..40: mol_type = other DNA
ggcatgtcaatattactgtgttcagatccaggatactgag

SEQ ID NO: 8865 - DNA, 40 bp, synthetic construct
  source 1..40: mol_type = other DNA
gaatacaggtcccgctggcctgcgtctctgattcaggcca

SEQ ID NO: 8866 - DNA, 40 bp, synthetic construct
  source 1..40: mol_type = other DNA
cgaagcacctggttgcaatttcagtcacattgacaaacac

SEQ ID NO: 8867 - DNA, 40 bp, synthetic construct
  source 1..40: mol_type = other DNA
actgcaggtagatacaatagtcactctggaaacaatggag

SEQ ID NO: 8868 - DNA, 40 bp, synthetic construct
  source 1..40: mol_type = other DNA
cctgtccaaatcttccaccagtcattgaaagaggtcctgt

SEQ ID NO: 8869 - DNA, 40 bp, synthetic construct
  source 1..40: mol_type = other DNA
tcagagctttctccatctgggcaggtctcaaatccgatgc

SEQ ID NO: 8870 - DNA, 40 bp, synthetic construct
  source 1..40: mol_type = other DNA
cttatccatcttcaaagagggtgtgtgagacagcatcact

SEQ ID NO: 8871 - DNA, 40 bp, synthetic construct
  source 1..40: mol_type = other DNA
gctccatcaaaggtgtaaatggacagtggacttgtttaga

SEQ ID NO: 8872 - DNA, 40 bp, synthetic construct
  source 1..40: mol_type = other DNA
gtcgtgcttaaatgaagagatgctttgttccttctgcaga

SEQ ID NO: 8873 - DNA, 40 bp, synthetic construct
  source 1..40: mol_type = other DNA
aaattctctgagatggacccaggccttcatccctgctcgt

SEQ ID NO: 8874 - DNA, 40 bp, synthetic construct
  source 1..40: mol_type = other DNA
acacgagctgagttaatggggctttgtagggcttgcatga

SEQ ID NO: 8875 - DNA, 40 bp, synthetic construct
  source 1..40: mol_type = other DNA
tggaagtgaaagctacaaagctccgcccacttggtagatg

SEQ ID NO: 8876 - DNA, 40 bp, synthetic construct
  source 1..40: mol_type = other DNA
gaagtgagctgagacactggtgaaaggagaatgtcccagg

SEQ ID NO: 8877 - DNA, 40 bp, synthetic construct
  source 1..40: mol_type = other DNA
agccaggatcacaatggagaccctcgtcagatgggcgcag

SEQ ID NO: 8878 - DNA, 40 bp, synthetic construct
  source 1..40: mol_type = other DNA
ccaattgctcacgtagaagacaggcagggctgatgacaat

SEQ ID NO: 8879 - DNA, 40 bp, synthetic construct
  source 1..40: mol_type = other DNA
gtcagtttccagaatacagagaagataaaagccgcgtctt

SEQ ID NO: 8880 - DNA, 40 bp, synthetic construct
  source 1..40: mol_type = other DNA
aaaaggttgcccaggaacttttgccttctggaagaaatca

SEQ ID NO: 8881 - DNA, 40 bp, synthetic construct
  source 1..40: mol_type = other DNA
gttggagactcaagcacctcgaagtacttgttcccttgcc

SEQ ID NO: 8882 - DNA, 40 bp, synthetic construct
  source 1..40: mol_type = other DNA
cgcacaacagtattgtgaccccacgccctaccgcgatgtg

SEQ ID NO: 8883 - DNA, 40 bp, synthetic construct
  source 1..40: mol_type = other DNA
gtctgactctaaaagagaccgagaacaagtgagtctagga

SEQ ID NO: 8884 - DNA, 40 bp, synthetic construct
  source 1..40: mol_type = other DNA
caatatttcatctgaagggcagttttgcatgaaggcttgg

SEQ ID NO: 8885 - DNA, 40 bp, synthetic construct
  source 1..40: mol_type = other DNA
cctctcttgttggatgagtttctgtaaagtttagcagtgc

SEQ ID NO: 8886 - DNA, 40 bp, synthetic construct
  source 1..40: mol_type = other DNA
atcgaggttgagggtcaggagcatgttggaaatctacttg

SEQ ID NO: 8887 - DNA, 40 bp, synthetic construct
  source 1..40: mol_type = other DNA
acgttacgcgctgccacgtccatgaccattggtcaacagc

SEQ ID NO: 8888 - DNA, 40 bp, synthetic construct
  source 1..40: mol_type = other DNA
cggtgggtacatgagctccacctatgcccaggtagtatgg

SEQ ID NO: 8889 - DNA, 40 bp, synthetic construct
  source 1..40: mol_type = other DNA
tttgtaagaattgggcccattccatggcattaaccacatg

SEQ ID NO: 8890 - DNA, 40 bp, synthetic construct
  source 1..40: mol_type = other DNA
atgtactggaaagccgttgtcgatgcccttgttatcaatg

SEQ ID NO: 8891 - DNA, 40 bp, synthetic construct
  source 1..40: mol_type = other DNA
aatctagagcagttgtaaggcctgcttagatgcatctact

SEQ ID NO: 8892 - DNA, 40 bp, synthetic construct
  source 1..40: mol_type = other DNA
gccgccatttcgagttagggccgatctgcttctcgaaggt

SEQ ID NO: 8893 - DNA, 40 bp, synthetic construct
  source 1..40: mol_type = other DNA
attgggcccactcccaccctgaagagccagaacaaagtgc

SEQ ID NO: 8894 - DNA, 40 bp, synthetic construct
  source 1..40: mol_type = other DNA
tcaagtgaggcaatcctggacagcagaggcctagcaagtc

SEQ ID NO: 8895 - DNA, 40 bp, synthetic construct
  source 1..40: mol_type = other DNA
ggttaaggaatcaaagtcagggcttgttccaaaagccggg

SEQ ID NO: 8896 - DNA, 40 bp, synthetic construct
  source 1..40: mol_type = other DNA
tgaggatcccaaagaccacccttctgctgccgtcgcttga

SEQ ID NO: 8897 - DNA, 40 bp, synthetic construct
  source 1..40: mol_type = other DNA
atgtccacaccgccgatgaggacggtcatcgtccgtgacc

SEQ ID NO: 8898 - DNA, 40 bp, synthetic construct
  source 1..40: mol_type = other DNA
gtactccttcccttcttggcgaaaaatgggctttgtctgt

SEQ ID NO: 8899 - DNA, 40 bp, synthetic construct
  source 1..40: mol_type = other DNA
atctctcggtacgtggagttaaaacttcagtcttctgcct

SEQ ID NO: 8900 - DNA, 40 bp, synthetic construct
  source 1..40: mol_type = other DNA
gccctatcctatattggcacactgtaccggaacctgtagt

SEQ ID NO: 8901 - DNA, 40 bp, synthetic construct
  source 1..40: mol_type = other DNA
atcctggcacgtggcggctgacttgatgatgtagccggta

SEQ ID NO: 8902 - DNA, 40 bp, synthetic construct
  source 1..40: mol_type = other DNA
taagagcatagacactcacttctgcttgtcaaagtgtcct

SEQ ID NO: 8903 - DNA, 40 bp, synthetic construct
  source 1..40: mol_type = other DNA
gcgacgactctgcaattctgggaccaggttgtaaaaaggg

SEQ ID NO: 8904 - DNA, 40 bp, synthetic construct
  source 1..40: mol_type = other DNA
acaaagcatgtaggcctagaacaattacagggacttgttc

SEQ ID NO: 8905 - DNA, 40 bp, synthetic construct
  source 1..40: mol_type = other DNA
ctcatcacgcaggtgggctcaggcacgggcaggatttctc

SEQ ID NO: 8906 - DNA, 40 bp, synthetic construct
  source 1..40: mol_type = other DNA
aggaagcgaggagccggcagggagagtggattctggatcg

SEQ ID NO: 8907 - DNA, 40 bp, synthetic construct
  source 1..40: mol_type = other DNA
actatcctggccgtgctgtgggctgtaatgcagaggcatt

SEQ ID NO: 8908 - DNA, 40 bp, synthetic construct
  source 1..40: mol_type = other DNA
ctccttttggtgtattcgttttgggagttattaagagcgc

SEQ ID NO: 8909 - DNA, 40 bp, synthetic construct
  source 1..40: mol_type = other DNA
gtcttgaatgaggagttactactaagtaggaccatgtagg

SEQ ID NO: 8910 - DNA, 40 bp, synthetic construct
  source 1..40: mol_type = other DNA
tcaggaagccaccgcacctccagcacgaagtcgtctcgta

SEQ ID NO: 8911 - DNA, 40 bp, synthetic construct
  source 1..40: mol_type = other DNA
cagtgtggttgctaaagtgcactgtcagcaacacttcctg

SEQ ID NO: 8912 - DNA, 40 bp, synthetic construct
  source 1..40: mol_type = other DNA
gtgcgcctaaaaccacagtgctcattctttgagagagagt

SEQ ID NO: 8913 - DNA, 40 bp, synthetic construct
  source 1..40: mol_type = other DNA
ggaagacacctttacagatcacctccagagactatagcgt

SEQ ID NO: 8914 - DNA, 40 bp, synthetic construct
  source 1..40: mol_type = other DNA
atccggcagcagtagatccctcattatgcctgggatttgg

SEQ ID NO: 8915 - DNA, 40 bp, synthetic construct
  source 1..40: mol_type = other DNA
aatgcacttcgtttttcccttggccaatacacaccaatca

SEQ ID NO: 8916 - DNA, 40 bp, synthetic construct
  source 1..40: mol_type = other DNA
gtccaaattcttcaagccgcagcctcaaagctggcaaatc

SEQ ID NO: 8917 - DNA, 40 bp, synthetic construct
  source 1..40: mol_type = other DNA
aatcctagcacagggactcctcagcacagctatgatgaaa

SEQ ID NO: 8918 - DNA, 40 bp, synthetic construct
  source 1..40: mol_type = other DNA
tacacgggcgagttcagcacggcagctctaaaatcacagc

SEQ ID NO: 8919 - DNA, 40 bp, synthetic construct
  source 1..40: mol_type = other DNA
agatcaggcagatgtttagcgaagctggccagactctatg

SEQ ID NO: 8920 - DNA, 40 bp, synthetic construct
  source 1..40: mol_type = other DNA
aagagaacccaaaacgatgcgggtcctggcagtaacagcc

SEQ ID NO: 8921 - DNA, 40 bp, synthetic construct
  source 1..40: mol_type = other DNA
tcacatagccttgcctaattcctgagataaagccttgtaa

SEQ ID NO: 8922 - DNA, 40 bp, synthetic construct
  source 1..40: mol_type = other DNA
tcccgtctttgtatctcaggtgcttgtcatgtagtagctg

SEQ ID NO: 8923 - DNA, 40 bp, synthetic construct
  source 1..40: mol_type = other DNA
gggtggctctcggagatgttcggcgctgaaagtggcattg

SEQ ID NO: 8924 - DNA, 40 bp, synthetic construct
  source 1..40: mol_type = other DNA
tgtgagagcacacaactggaccggtcgagaaggaagcctg

SEQ ID NO: 8925 - DNA, 40 bp, synthetic construct
  source 1..40: mol_type = other DNA
agtcagagctagaatttcggcataccactggaaacagcaa

SEQ ID NO: 8926 - DNA, 40 bp, synthetic construct
  source 1..40: mol_type = other DNA
ggatctctaggttcacactgcccgaggatgaagccattgt

SEQ ID NO: 8927 - DNA, 40 bp, synthetic construct
  source 1..40: mol_type = other DNA
cctctctgagctgggtgttcttagcctgcaggtctaaccc

SEQ ID NO: 8928 - DNA, 40 bp, synthetic construct
  source 1..40: mol_type = other DNA
ggcatctcggagatctcgaaaaagtcttcactctgctgaa

SEQ ID NO: 8929 - DNA, 40 bp, synthetic construct
  source 1..40: mol_type = other DNA
agtcaaaccttccttcttggcaagaagcaaattggtactc

SEQ ID NO: 8930 - DNA, 40 bp, synthetic construct
  source 1..40: mol_type = other DNA
gaagagctgagtttgctaaagcataactcttcccaatagg

SEQ ID NO: 8931 - DNA, 40 bp, synthetic construct
  source 1..40: mol_type = other DNA
agtgatcgtacaggtgcatcagtcccggagcgtgcagttc

SEQ ID NO: 8932 - DNA, 40 bp, synthetic construct
  source 1..40: mol_type = other DNA
tgcttcagacacctgtgtaatcaggtacttctgccatggc

SEQ ID NO: 8933 - DNA, 40 bp, synthetic construct
  source 1..40: mol_type = other DNA
attttgcagacgctctcagcaccttgtcttcccgtgggtc

SEQ ID NO: 8934 - DNA, 40 bp, synthetic construct
  source 1..40: mol_type = other DNA
ggcttcttaccaagaaattcgacttctgttgtctgttccc

SEQ ID NO: 8935 - DNA, 40 bp, synthetic construct
  source 1..40: mol_type = other DNA
caactgtggtcagtttctgacaccctcagggtgacgatgt

SEQ ID NO: 8936 - DNA, 40 bp, synthetic construct
  source 1..40: mol_type = other DNA
aaatggtcagcagccctctcaggcaacaggaatcctgacc

SEQ ID NO: 8937 - DNA, 40 bp, synthetic construct
  source 1..40: mol_type = other DNA
cccatgctacatttgccgaaaacaacaacaatctgaggtg

SEQ ID NO: 8938 - DNA, 40 bp, synthetic construct
  source 1..40: mol_type = other DNA
gtgtttatcgctccctctcctgtggcatcttgcagagttt

SEQ ID NO: 8939 - DNA, 40 bp, synthetic construct
  source 1..40: mol_type = other DNA
taacttggactccattcacttctctggagttctgaagtaa

SEQ ID NO: 8940 - DNA, 40 bp, synthetic construct
  source 1..40: mol_type = other DNA
actgaactcaggaagagtggcttgactcatgttgagtgcc

SEQ ID NO: 8941 - DNA, 40 bp, synthetic construct
  source 1..40: mol_type = other DNA
tctgcatctctagccagggtcgggatttggttggaattaa

SEQ ID NO: 8942 - DNA, 40 bp, synthetic construct
  source 1..40: mol_type = other DNA
caagaacaccaggctgatggtggttcagccggacgggcac

SEQ ID NO: 8943 - DNA, 40 bp, synthetic construct
  source 1..40: mol_type = other DNA
aatggcgttcccaccagagaggaggttcccgaaagcagac

SEQ ID NO: 8944 - DNA, 40 bp, synthetic construct
  source 1..40: mol_type = other DNA
acctagagaagttgctaaggtcctctgtgtccaagttgaa

SEQ ID NO: 8945 - DNA, 40 bp, synthetic construct
  source 1..40: mol_type = other DNA
gaggtcatcaagcatggagtcctagcttcttgacattcct

SEQ ID NO: 8946 - DNA, 40 bp, synthetic construct
  source 1..40: mol_type = other DNA
tgttcacgaacggcagcacgtcgcagcttatcagggtgcg

SEQ ID NO: 8947 - DNA, 40 bp, synthetic construct
  source 1..40: mol_type = other DNA
tgtcataagtgtagcaggtcagctgtgtagcacttgtttc

SEQ ID NO: 8948 - DNA, 40 bp, synthetic construct
  source 1..40: mol_type = other DNA
tattgtgggctctgggaatccctggacaaaaataccaatc

SEQ ID NO: 8949 - DNA, 40 bp, synthetic construct
  source 1..40: mol_type = other DNA
atatagatccactgctggtgtatcagtgaaggttctgttc

SEQ ID NO: 8950 - DNA, 40 bp, synthetic construct
  source 1..40: mol_type = other DNA
ggcactattaggtagtaccacactttgtgccactaaatgt

SEQ ID NO: 8951 - DNA, 40 bp, synthetic construct
  source 1..40: mol_type = other DNA
cgggaagagacaggtcagcttcttcacggcttgccgcgtg

SEQ ID NO: 8952 - DNA, 40 bp, synthetic construct
  source 1..40: mol_type = other DNA
tatccctaaggtcccagaaagacatcaacgaaaggcatat

SEQ ID NO: 8953 - DNA, 40 bp, synthetic construct
  source 1..40: mol_type = other DNA
tcaaggaggtaaagttaagccacccaagtccatgtcattt

SEQ ID NO: 8954 - DNA, 40 bp, synthetic construct
  source 1..40: mol_type = other DNA
ggcatttctgatgtgactcacctgaggaaataagatgtag

SEQ ID NO: 8955 - DNA, 40 bp, synthetic construct
  source 1..40: mol_type = other DNA
caatatagtctccacacagctatccctgctgttaatctca

SEQ ID NO: 8956 - DNA, 40 bp, synthetic construct
  source 1..40: mol_type = other DNA
ctaaggcagaaaatcgtcttcggagggtgaatcccttgct

SEQ ID NO: 8957 - DNA, 40 bp, synthetic construct
  source 1..40: mol_type = other DNA
tgtgtggaagagaaagcaaagttccatggcaccttatttt

SEQ ID NO: 8958 - DNA, 40 bp, synthetic construct
  source 1..40: mol_type = other DNA
ataggtaccttggttaggaccatgatagctagcgcttttc

SEQ ID NO: 8959 - DNA, 40 bp, synthetic construct
  source 1..40: mol_type = other DNA
tgtctgtggttccatagatcataacctctggagcacagat

SEQ ID NO: 8960 - DNA, 40 bp, synthetic construct
  source 1..40: mol_type = other DNA
gtccgtttttgatggcactctagagagtgatagcaaccca

SEQ ID NO: 8961 - DNA, 40 bp, synthetic construct
  source 1..40: mol_type = other DNA
gttaaggcagagacatgtcctagagtgggagttaggaaaa

SEQ ID NO: 8962 - DNA, 40 bp, synthetic construct
  source 1..40: mol_type = other DNA
gcccaccagtgaagacatccatgaagaagctttgcgtggg

SEQ ID NO: 8963 - DNA, 40 bp, synthetic construct
  source 1..40: mol_type = other DNA
acctggtcgatggatggtgactgtgctggagtatggctcc

SEQ ID NO: 8964 - DNA, 40 bp, synthetic construct
  source 1..40: mol_type = other DNA
ggagcctgatctctggtttcgacgtggtcactgccagacg

SEQ ID NO: 8965 - DNA, 40 bp, synthetic construct
  source 1..40: mol_type = other DNA
gctggatcttccctccttgaccgtatccgcgctgtacgtg

SEQ ID NO: 8966 - DNA, 40 bp, synthetic construct
  source 1..40: mol_type = other DNA
acctgcagcaaaggctgcggcagtccagtccagagtcctt

SEQ ID NO: 8967 - DNA, 40 bp, synthetic construct
  source 1..40: mol_type = other DNA
tttggccaggatacttctgctgttggcaggaacgctgacg

SEQ ID NO: 8968 - DNA, 40 bp, synthetic construct
  source 1..40: mol_type = other DNA
tcatatcaggtcaccctggctccagaagcttctttagatg

SEQ ID NO: 8969 - DNA, 40 bp, synthetic construct
  source 1..40: mol_type = other DNA
gaagtcacgcccgttgggcagccctgaccacgctcatgtg

SEQ ID NO: 8970 - DNA, 40 bp, synthetic construct
  source 1..40: mol_type = other DNA
ctgatcctctgccaccaccgtagtagacattcacccattc

SEQ ID NO: 8971 - DNA, 40 bp, synthetic construct
  source 1..40: mol_type = other DNA
ggagcaccagcttctctgcagctgttcatgatgcgaatac

SEQ ID NO: 8972 - DNA, 40 bp, synthetic construct
  source 1..40: mol_type = other DNA
tcagcgggaaggactttatgcgccctcgcctttgctttgg

SEQ ID NO: 8973 - DNA, 40 bp, synthetic construct
  source 1..40: mol_type = other DNA
attcagctggtcgatatcaccggaggtcagcggactctgg

SEQ ID NO: 8974 - DNA, 40 bp, synthetic construct
  source 1..40: mol_type = other DNA
cattgtcactgatgtcaaaccacgtcctcgagccggtcag

SEQ ID NO: 8975 - DNA, 40 bp, synthetic construct
  source 1..40: mol_type = other DNA
tcgtacttgatcttgccgtttcttggcgcaaacgttgcat

SEQ ID NO: 8976 - DNA, 40 bp, synthetic construct
  source 1..40: mol_type = other DNA
ggctgcgcttgcactctgagtgcaccaggcacgaacttgt

SEQ ID NO: 8977 - DNA, 40 bp, synthetic construct
  source 1..40: mol_type = other DNA
aatacgaagacagccctggcgacaagcttggtctaatggg

SEQ ID NO: 8978 - DNA, 40 bp, synthetic construct
  source 1..40: mol_type = other DNA
aactgggtaattccatgttcgcctggtgaatgattcaaca

SEQ ID NO: 8979 - DNA, 40 bp, synthetic construct
  source 1..40: mol_type = other DNA
gtttacgctgtctagccagatccatccttgaaaaggcgca

SEQ ID NO: 8980 - DNA, 40 bp, synthetic construct
  source 1..40: mol_type = other DNA
aggcgtcatcgttccatttgggctgcctttagtttgtggc

SEQ ID NO: 8981 - DNA, 40 bp, synthetic construct
  source 1..40: mol_type = other DNA
ccattacttcactggagttactttcaacttgagcaggacc

SEQ ID NO: 8982 - DNA, 40 bp, synthetic construct
  source 1..40: mol_type = other DNA
gatgatgaagcggcccaggagtcaggccgcagtacacacc

SEQ ID NO: 8983 - DNA, 40 bp, synthetic construct
  source 1..40: mol_type = other DNA
gcggtcccataacacttgtttgctggaaaagactgaaggt

SEQ ID NO: 8984 - DNA, 40 bp, synthetic construct
  source 1..40: mol_type = other DNA
gtctaacatcactgtgctctctgtcaagctctttctgttt

SEQ ID NO: 8985 - DNA, 40 bp, synthetic construct
  source 1..40: mol_type = other DNA
gttgagattctgctaatgacaatttgttgacgggtctgaa

SEQ ID NO: 8986 - DNA, 40 bp, synthetic construct
  source 1..40: mol_type = other DNA
ccacgaccaacgtacgatgaggagttgatctgagttaaga

SEQ ID NO: 8987 - DNA, 40 bp, synthetic construct
  source 1..40: mol_type = other DNA
tggctctgttgaatcacttcagaaggtctgatggagaatg

SEQ ID NO: 8988 - DNA, 40 bp, synthetic construct
  source 1..40: mol_type = other DNA
tcccactttcagcagcatactgcccaccaatgtagaggat

SEQ ID NO: 8989 - DNA, 40 bp, synthetic construct
  source 1..40: mol_type = other DNA
gagttaagtttcgagtgaagtatggtgagaatggacatga

SEQ ID NO: 8990 - DNA, 40 bp, synthetic construct
  source 1..40: mol_type = other DNA
catgtctccgcaacccggctatcggctcggtgcccgtcag

SEQ ID NO: 8991 - DNA, 40 bp, synthetic construct
  source 1..40: mol_type = other DNA
cctcatagctgtggtcccgggctgactgctcgaaactcag

SEQ ID NO: 8992 - DNA, 40 bp, synthetic construct
  source 1..40: mol_type = other DNA
tcaaggatagaagctgattctctctccaccagaatctaag

SEQ ID NO: 8993 - DNA, 40 bp, synthetic construct
  source 1..40: mol_type = other DNA
ccgaggcacaggtatagctgcatcatccagctgagaaaag

SEQ ID NO: 8994 - DNA, 40 bp, synthetic construct
  source 1..40: mol_type = other DNA
gcgaaagccctcaatttccccaggagcagtgggcgctaag

SEQ ID NO: 8995 - DNA, 40 bp, synthetic construct
  source 1..40: mol_type = other DNA
tggtgactgaatgagttcattgcatctcagagtgttgcta

SEQ ID NO: 8996 - DNA, 40 bp, synthetic construct
  source 1..40: mol_type = other DNA
tttctaacatctataggccccatttcagtaacctgaccca

SEQ ID NO: 8997 - DNA, 40 bp, synthetic construct
  source 1..40: mol_type = other DNA
caaccttgcttcacattctcttttaaccatgcgcaagaca

SEQ ID NO: 8998 - DNA, 40 bp, synthetic construct
  source 1..40: mol_type = other DNA
cggtacatccacgtagttttgtaagcaagtcctcaaatga

SEQ ID NO: 8999 - DNA, 40 bp, synthetic construct
  source 1..40: mol_type = other DNA
tctctccggttttttccaatgtttttcagagtgagcaaag

SEQ ID NO: 9000 - DNA, 40 bp, synthetic construct
  source 1..40: mol_type = other DNA
cagaaaaagtaaagggcagattcaaaaccgtggcaagagc

SEQ ID NO: 9001 - DNA, 40 bp, synthetic construct
  source 1..40: mol_type = other DNA
aaagaaaggccatcatctagcaaccctaggcatgttgttc

SEQ ID NO: 9002 - DNA, 40 bp, synthetic construct
  source 1..40: mol_type = other DNA
tcgttttcgtggtgacaagacaggctcttgcaatagtcat

SEQ ID NO: 9003 - DNA, 40 bp, synthetic construct
  source 1..40: mol_type = other DNA
tacgtaagcagagagccggaggcaggaggtatgcatggca

SEQ ID NO: 9004 - DNA, 40 bp, synthetic construct
  source 1..40: mol_type = other DNA
ttcacacatgctgcatcctgtgaccttgtttacaatcctg

SEQ ID NO: 9005 - DNA, 40 bp, synthetic construct
  source 1..40: mol_type = other DNA
tgttatgactccaggattgtatggtttccttggaatgcag

SEQ ID NO: 9006 - DNA, 40 bp, synthetic construct
  source 1..40: mol_type = other DNA
atcagttgcaagcagtcttgttggtgtttcactgtctgca

SEQ ID NO: 9007 - DNA, 40 bp, synthetic construct
  source 1..40: mol_type = other DNA
gacatacttcaggatgccaaataaggagcacatgctatgt

SEQ ID NO: 9008 - DNA, 40 bp, synthetic construct
  source 1..40: mol_type = other DNA
ggcgtattccatgacgagaggggtccagtgaagcgtcaga

SEQ ID NO: 9009 - DNA, 40 bp, synthetic construct
  source 1..40: mol_type = other DNA
agttggtcaccaaatcagcagaggctcagcaatgagtgac

SEQ ID NO: 9010 - DNA, 40 bp, synthetic construct
  source 1..40: mol_type = other DNA
ctccaatctgagcagcaatcacatgtcaacatgactgagt

SEQ ID NO: 9011 - DNA, 40 bp, synthetic construct
  source 1..40: mol_type = other DNA
tgcaaaatagagcacgagaagcaggtattattaaggagga

SEQ ID NO: 9012 - DNA, 40 bp, synthetic construct
  source 1..40: mol_type = other DNA
tcgatctcatcagggtactcaggatggcttgaagatgtac

SEQ ID NO: 9013 - DNA, 40 bp, synthetic construct
  source 1..40: mol_type = other DNA
gctcggtgatttagcagcaaaaaactctctaatcttccgg

SEQ ID NO: 9014 - DNA, 40 bp, synthetic construct
  source 1..40: mol_type = other DNA
cacatttgtcagtctggtggctgaacaaaagcatccgata

SEQ ID NO: 9015 - DNA, 40 bp, synthetic construct
  source 1..40: mol_type = other DNA
ccaggattcactgggatcagtcatacacgtactcctggac

SEQ ID NO: 9016 - DNA, 40 bp, synthetic construct
  source 1..40: mol_type = other DNA
ggttcagtacagagatgcccctggaccttggttttgttgg

SEQ ID NO: 9017 - DNA, 40 bp, synthetic construct
  source 1..40: mol_type = other DNA
tgacgtttccatggctggtgattgcttgttggatgaactg

SEQ ID NO: 9018 - DNA, 40 bp, synthetic construct
  source 1..40: mol_type = other DNA
ggagacctgcagtagtagccccttccgtgaagactctgct

SEQ ID NO: 9019 - DNA, 40 bp, synthetic construct
  source 1..40: mol_type = other DNA
catggaggctgcaaagtgatcctcttggaacacgctgacc

SEQ ID NO: 9020 - DNA, 40 bp, synthetic construct
  source 1..40: mol_type = other DNA
ttagcaacttgggacagtgagctgagatagttctgttcac

SEQ ID NO: 9021 - DNA, 40 bp, synthetic construct
  source 1..40: mol_type = other DNA
gtcctgcctcaaccattaatcagttcccacactctgtatg

SEQ ID NO: 9022 - DNA, 40 bp, synthetic construct
  source 1..40: mol_type = other DNA
acgctgaccacgtcatacaagggtccgtgcgatcctcagc

SEQ ID NO: 9023 - DNA, 40 bp, synthetic construct
  source 1..40: mol_type = other DNA
ggcaagcgcagctgagctccatcaaaacggcttccttcag

SEQ ID NO: 9024 - DNA, 40 bp, synthetic construct
  source 1..40: mol_type = other DNA
gtcttctgtgtgaaggccagtacccgccaagcggtcgatg

SEQ ID NO: 9025 - DNA, 40 bp, synthetic construct
  source 1..40: mol_type = other DNA
aacaacctcattcctcatgtcgttctttgcttgaaatcag

SEQ ID NO: 9026 - DNA, 40 bp, synthetic construct
  source 1..40: mol_type = other DNA
tagaagcctttgaccaggcaccacggcgatgtcgctggga

SEQ ID NO: 9027 - DNA, 40 bp, synthetic construct
  source 1..40: mol_type = other DNA
ctacagcgatgaagcagcagaatgaaacggattcccatgg

SEQ ID NO: 9028 - DNA, 40 bp, synthetic construct
  source 1..40: mol_type = other DNA
taagataatcatggcccactaggctggagaataatgcctt

SEQ ID NO: 9029 - DNA, 40 bp, synthetic construct
  source 1..40: mol_type = other DNA
agaaaaccttctctgcagcttggctgtcggtccatgtagg

SEQ ID NO: 9030 - DNA, 40 bp, synthetic construct
  source 1..40: mol_type = other DNA
gctcagccgtgagttcagctctcatcagggtggtatccga

SEQ ID NO: 9031 - DNA, 40 bp, synthetic construct
  source 1..40: mol_type = other DNA
aagaagatgccgtgcatgtctggtctcatcgagtgagcgg

SEQ ID NO: 9032 - DNA, 40 bp, synthetic construct
  source 1..40: mol_type = other DNA
aggacaacagcagatactcccagtttgacgatgcggttgt

SEQ ID NO: 9033 - DNA, 40 bp, synthetic construct
  source 1..40: mol_type = other DNA
gggcacacacagctcttctcgtactcactggaccacactg

SEQ ID NO: 9034 - DNA, 40 bp, synthetic construct
  source 1..40: mol_type = other DNA
gtaccttatccctcttctacggatgatctctatgtgaaag

SEQ ID NO: 9035 - DNA, 40 bp, synthetic construct
  source 1..40: mol_type = other DNA
cagacatctcttctcaccctatggccttcgattctggatt

SEQ ID NO: 9036 - DNA, 40 bp, synthetic construct
  source 1..40: mol_type = other DNA
aaccagcctttcttaaggtaactttgtaaactccgatggt

SEQ ID NO: 9037 - DNA, 40 bp, synthetic construct
  source 1..40: mol_type = other DNA
tatagccatgcccttcacaccacaatatcacagccaaggc

SEQ ID NO: 9038 - DNA, 40 bp, synthetic construct
  source 1..40: mol_type = other DNA
gggcaagatttgaattcgatcttggacaaccattcccacg

SEQ ID NO: 9039 - DNA, 40 bp, synthetic construct
  source 1..40: mol_type = other DNA
gagatgaacttcattctgtcgcatgagaagcagagatgtc

SEQ ID NO: 9040 - DNA, 40 bp, synthetic construct
  source 1..40: mol_type = other DNA
ccgttccctttcttcatgggctctagcgcttagtacttca

SEQ ID NO: 9041 - DNA, 40 bp, synthetic construct
  source 1..40: mol_type = other DNA
gttttaccacgtgcttcttaagtccagaatatccgcaagt

SEQ ID NO: 9042 - DNA, 40 bp, synthetic construct
  source 1..40: mol_type = other DNA
cgtgatcccatcggcccagggcttctctcgcattcttctg

SEQ ID NO: 9043 - DNA, 40 bp, synthetic construct
  source 1..40: mol_type = other DNA
agcacttggtggtcactcaccggcaacctcggcgtcattt

SEQ ID NO: 9044 - DNA, 40 bp, synthetic construct
  source 1..40: mol_type = other DNA
atgcaatagcaggacaggatgtgacagcttggagatgata

SEQ ID NO: 9045 - DNA, 40 bp, synthetic construct
  source 1..40: mol_type = other DNA
cccactcctgaaaactgaaaactgtaggtgctgaaatcaa

SEQ ID NO: 9046 - DNA, 40 bp, synthetic construct
  source 1..40: mol_type = other DNA
agtcttttgtcccagtttggacatcttagccagaacttga

SEQ ID NO: 9047 - DNA, 40 bp, synthetic construct
  source 1..40: mol_type = other DNA
gcgaagagaatctctggcaagatggccttggctgactttg

SEQ ID NO: 9048 - DNA, 40 bp, synthetic construct
  source 1..40: mol_type = other DNA
tttccattgatgtgagacccttggaattgtcctcagaaga

SEQ ID NO: 9049 - DNA, 40 bp, synthetic construct
  source 1..40: mol_type = other DNA
attctaccatcagagcctcacagttaacacagtttatggc

SEQ ID NO: 9050 - DNA, 40 bp, synthetic construct
  source 1..40: mol_type = other DNA
cgtctcggaatttgcggcagggtgtccttgcacgtggctt

SEQ ID NO: 9051 - DNA, 40 bp, synthetic construct
  source 1..40: mol_type = other DNA
ccggcaagagacgcagtccctccctgcctcggctgacatt

SEQ ID NO: 9052 - DNA, 40 bp, synthetic construct
  source 1..40: mol_type = other DNA
attgatcgccgggcgactattcacttacatggacgtgaag

SEQ ID NO: 9053 - DNA, 40 bp, synthetic construct
  source 1..40: mol_type = other DNA
gcgaccaaagaacgagaaaaggcgttgattacgcaggatt

SEQ ID NO: 9054 - DNA, 40 bp, synthetic construct
  source 1..40: mol_type = other DNA
cgagtagacgggatctgctgaatcatagccgctccattgc

SEQ ID NO: 9055 - DNA, 40 bp, synthetic construct
  source 1..40: mol_type = other DNA
ctacgctcgaagtttggttatacgatgccggagcgaacga

SEQ ID NO: 9056 - DNA, 40 bp, synthetic construct
  source 1..40: mol_type = other DNA
tactgacttggactggtacgggcccgaagatcaaagacgc

SEQ ID NO: 9057 - DNA, 40 bp, synthetic construct
  source 1..40: mol_type = other DNA
atcgtgttatggacgatgacatgcttgaaggtttcactag

SEQ ID NO: 9058 - DNA, 40 bp, synthetic construct
  source 1..40: mol_type = other DNA
gctgagggaattaggaggcgggtagacgaaatgatcgtgg

SEQ ID NO: 9059 - DNA, 40 bp, synthetic construct
  source 1..40: mol_type = other DNA
gatttgtccatgctcaccaggtatgtaaggcctgaccgga

SEQ ID NO: 9060 - DNA, 40 bp, synthetic construct
  source 1..40: mol_type = other DNA
cgttgtcaccacttccttcagtacagatggcggcaagcat

SEQ ID NO: 9061 - DNA, 40 bp, synthetic construct
  source 1..40: mol_type = other DNA
attcctaagatggaggatagcacgccggttatctcttgca

SEQ ID NO: 9062 - DNA, 40 bp, synthetic construct
  source 1..40: mol_type = other DNA
tacaagtggtacgtactctacctatttttagcgcttcttc

SEQ ID NO: 9063 - DNA, 40 bp, synthetic construct
  source 1..40: mol_type = other DNA
ttgcagttggtgctgtaaacctgttgacggattgctctaa

SEQ ID NO: 9064 - DNA, 40 bp, synthetic construct
  source 1..40: mol_type = other DNA
tacttgttttccgaccacggagaagtccttggagatgtcg

SEQ ID NO: 9065 - DNA, 40 bp, synthetic construct
  source 1..40: mol_type = other DNA
ggtgatattgtgtctctggtttgtcgcaaagcgggcacat

SEQ ID NO: 9066 - DNA, 40 bp, synthetic construct
  source 1..40: mol_type = other DNA
tacctagttgttcttccatctttttccatatcctggcagg

SEQ ID NO: 9067 - DNA, 40 bp, synthetic construct
  source 1..40: mol_type = other DNA
attaggtgggagttttcgcctactctatagtgggactgag

SEQ ID NO: 9068 - DNA, 40 bp, synthetic construct
  source 1..40: mol_type = other DNA
acgaccctttctaaagtgggagtagaggattaaaggagtg

SEQ ID NO: 9069 - DNA, 40 bp, synthetic construct
  source 1..40: mol_type = other DNA
catcgtggcacccggcaggtcgggctgtgtaggtgacggt

SEQ ID NO: 9070 - DNA, 40 bp, synthetic construct
  source 1..40: mol_type = other DNA
gcaggttccctcttccctcactccggatgcattcctgccc

SEQ ID NO: 9071 - DNA, 40 bp, synthetic construct
  source 1..40: mol_type = other DNA
tctgtgtcccttcatgcatgtggacaaggtagaactgaga

SEQ ID NO: 9072 - DNA, 40 bp, synthetic construct
  source 1..40: mol_type = other DNA
cctcccttccactctggtcttcgtttagttctccagacaa

SEQ ID NO: 9073 - DNA, 40 bp, synthetic construct
  source 1..40: mol_type = other DNA
ccagtgaaagtgaaactgaaccttgtccatcaagtgaacc

SEQ ID NO: 9074 - DNA, 40 bp, synthetic construct
  source 1..40: mol_type = other DNA
cccgaagattcattatttggtgcttagctaaagggaaaca

SEQ ID NO: 9075 - DNA, 40 bp, synthetic construct
  source 1..40: mol_type = other DNA
ctgctcggtgtagacacccacccggacgtgcgcaaacacc

SEQ ID NO: 9076 - DNA, 40 bp, synthetic construct
  source 1..40: mol_type = other DNA
ttcctgtacgtggactcagacagaaaagacactccaagca

SEQ ID NO: 9077 - DNA, 40 bp, synthetic construct
  source 1..40: mol_type = other DNA
cgacggccaaaatccatccaactcatactcctcggcactg

SEQ ID NO: 9078 - DNA, 40 bp, synthetic construct
  source 1..40: mol_type = other DNA
aagacagcagtcaaagttgcagaatacggtctgtgtatcc

SEQ ID NO: 9079 - DNA, 40 bp, synthetic construct
  source 1..40: mol_type = other DNA
gtgctacaaagaagctgtgccacggtccaaaccattcgga

SEQ ID NO: 9080 - DNA, 40 bp, synthetic construct
  source 1..40: mol_type = other DNA
cgttgaccattcaaaccttcagaatatcaacagccgcagg

SEQ ID NO: 9081 - DNA, 40 bp, synthetic construct
  source 1..40: mol_type = other DNA
gatcgaagagatctgttctaagaacttgcacatacagtgg

SEQ ID NO: 9082 - DNA, 40 bp, synthetic construct
  source 1..40: mol_type = other DNA
cttgagggatcgtcagcatcggagacgagcattattacca

SEQ ID NO: 9083 - DNA, 40 bp, synthetic construct
  source 1..40: mol_type = other DNA
atatagttcgaggttctggttggattcctctcacagaaga

SEQ ID NO: 9084 - DNA, 40 bp, synthetic construct
  source 1..40: mol_type = other DNA
tcactgctacgtgtagaatgctcaaaaggtaccacattcg

SEQ ID NO: 9085 - DNA, 40 bp, synthetic construct
  source 1..40: mol_type = other DNA
atatttgtctttcgtcctggtggtccgtgtacaccactcg

SEQ ID NO: 9086 - DNA, 40 bp, synthetic construct
  source 1..40: mol_type = other DNA
gatttggtgagatgctatgattgcaaaaagcctccatgtg

SEQ ID NO: 9087 - DNA, 40 bp, synthetic construct
  source 1..40: mol_type = other DNA
caaggtgcttagaccctgatgtggtattctagctaagcac

SEQ ID NO: 9088 - DNA, 40 bp, synthetic construct
  source 1..40: mol_type = other DNA
tgtttatcagaagctggttccccaagttcctagcagattg

SEQ ID NO: 9089 - DNA, 40 bp, synthetic construct
  source 1..40: mol_type = other DNA
gtgtgttgctggatgttccctggagataaagagctcttgt

SEQ ID NO: 9090 - DNA, 40 bp, synthetic construct
  source 1..40: mol_type = other DNA
acacttattacctgccagatcattcagcagtattggttga

SEQ ID NO: 9091 - DNA, 40 bp, synthetic construct
  source 1..40: mol_type = other DNA
tgtgttcagagaaggaatcggaaacttctagaaagctgcc

SEQ ID NO: 9092 - DNA, 40 bp, synthetic construct
  source 1..40: mol_type = other DNA
actagatctgtggcaatcataactactgcaacctcaattg

SEQ ID NO: 9093 - DNA, 40 bp, synthetic construct
  source 1..40: mol_type = other DNA
aaaatgttgaggtggcatcttttttcctccttaactctcc

SEQ ID NO: 9094 - DNA, 40 bp, synthetic construct
  source 1..40: mol_type = other DNA
ggagcatttgggacatcagagtgggaagagatcaggtatg

SEQ ID NO: 9095 - DNA, 40 bp, synthetic construct
  source 1..40: mol_type = other DNA
gagtagactcagcaaccagagggttcatcattacctggag

SEQ ID NO: 9096 - DNA, 40 bp, synthetic construct
  source 1..40: mol_type = other DNA
ttcatctctacctgggagtggtgaactgcttggtgtatgg

SEQ ID NO: 9097 - DNA, 40 bp, synthetic construct
  source 1..40: mol_type = other DNA
acctccggatgctgttcggcacttgtgataccacaaatgc

SEQ ID NO: 9098 - DNA, 40 bp, synthetic construct
  source 1..40: mol_type = other DNA
cttgaacgattctattgccaggtcatagggtcatagaatt

SEQ ID NO: 9099 - DNA, 40 bp, synthetic construct
  source 1..40: mol_type = other DNA
ggcaacccggactcccgaagaggcggagagtttgcaggtg

SEQ ID NO: 9100 - DNA, 40 bp, synthetic construct
  source 1..40: mol_type = other DNA
ggtgttggccgaccaggacattgtagaagtcccggataat

SEQ ID NO: 9101 - DNA, 40 bp, synthetic construct
  source 1..40: mol_type = other DNA
cggctaatgaagcacagggctttgagatggatctgttgac

SEQ ID NO: 9102 - DNA, 40 bp, synthetic construct
  source 1..40: mol_type = other DNA
ggatgatgttgtgggccgtccagcggattgtagaagtctt

SEQ ID NO: 9103 - DNA, 40 bp, synthetic construct
  source 1..40: mol_type = other DNA
ggtctccataaatttagggttgcagcgctttctccgccac

SEQ ID NO: 9104 - DNA, 40 bp, synthetic construct
  source 1..40: mol_type = other DNA
accagtcctaaacctctccaatttgctgtttagtgttggc

SEQ ID NO: 9105 - DNA, 40 bp, synthetic construct
  source 1..40: mol_type = other DNA
ggtataatgtggtgaggagacgtttactgcgtaagagcag

SEQ ID NO: 9106 - DNA, 40 bp, synthetic construct
  source 1..40: mol_type = other DNA
ccaagaagtctgtggtgaagagtgggtttgacgaggactg

SEQ ID NO: 9107 - DNA, 40 bp, synthetic construct
  source 1..40: mol_type = other DNA
atgtggttccgataacactggtaaatagcgcgtccctcaa

SEQ ID NO: 9108 - DNA, 40 bp, synthetic construct
  source 1..40: mol_type = other DNA
gcaggtccacagtaagtttctctccttttcagactctgcg

SEQ ID NO: 9109 - DNA, 40 bp, synthetic construct
  source 1..40: mol_type = other DNA
acatcctccaagatgtgattgggctatcacacacttgttc

SEQ ID NO: 9110 - DNA, 40 bp, synthetic construct
  source 1..40: mol_type = other DNA
cattcgagaacctgcttcggacagcacgagctaatttgtc

SEQ ID NO: 9111 - DNA, 40 bp, synthetic construct
  source 1..40: mol_type = other DNA
tgggtatcctgatgtgcacgcacccatggacgtacggcgc

SEQ ID NO: 9112 - DNA, 40 bp, synthetic construct
  source 1..40: mol_type = other DNA
ctctgagctcgagtcattgcggaacatagcagctcgtacc

SEQ ID NO: 9113 - DNA, 40 bp, synthetic construct
  source 1..40: mol_type = other DNA
gtgatgctccgatcagaaaactgcctacaacaggtcagta

SEQ ID NO: 9114 - DNA, 40 bp, synthetic construct
  source 1..40: mol_type = other DNA
tgatggctttataaagggctcctgcggactcgagggacac

SEQ ID NO: 9115 - DNA, 40 bp, synthetic construct
  source 1..40: mol_type = other DNA
gttggtcactttcttgtttctggatgctgattgaggacaa

SEQ ID NO: 9116 - DNA, 40 bp, synthetic construct
  source 1..40: mol_type = other DNA
attctcccacttcatgaggcttgaagacgccttcatgccg

SEQ ID NO: 9117 - DNA, 40 bp, synthetic construct
  source 1..40: mol_type = other DNA
ggtgtcatgacagcaggatgaaggtcaaggtcactcgagc

SEQ ID NO: 9118 - DNA, 40 bp, synthetic construct
  source 1..40: mol_type = other DNA
agccattcatttctgccttctgctcttctcccaagttttg

SEQ ID NO: 9119 - DNA, 40 bp, synthetic construct
  source 1..40: mol_type = other DNA
cgctcgccgaaggactagcgcggaccgcgtcgaaggtgct

SEQ ID NO: 9120 - DNA, 40 bp, synthetic construct
  source 1..40: mol_type = other DNA
cgcgcacggagatgagcgactgcacacttcttgtagaagg

SEQ ID NO: 9121 - DNA, 40 bp, synthetic construct
  source 1..40: mol_type = other DNA
cacggtagaagttattgtgggtccgcagagtccgagtctg

SEQ ID NO: 9122 - DNA, 40 bp, synthetic construct
  source 1..40: mol_type = other DNA
cggaggaaaggttggcaatgcgtctggtttcctgtaggac

SEQ ID NO: 9123 - DNA, 40 bp, synthetic construct
  source 1..40: mol_type = other DNA
tgagttcggtcacagacttgattggtgattatgtcgccgt

SEQ ID NO: 9124 - DNA, 40 bp, synthetic construct
  source 1..40: mol_type = other DNA
cctgtcatgtaatacaagccggctcagcagactaattaca

SEQ ID NO: 9125 - DNA, 40 bp, synthetic construct
  source 1..40: mol_type = other DNA
caggtggagaaattgtcctagttctacctgaaagaccttg

SEQ ID NO: 9126 - DNA, 40 bp, synthetic construct
  source 1..40: mol_type = other DNA
gatctcattcctaatggtccgaagatggaaggatctcacg

SEQ ID NO: 9127 - DNA, 40 bp, synthetic construct
  source 1..40: mol_type = other DNA
tccaagaagaaccggaactagcaacatggttaagctttgg

SEQ ID NO: 9128 - DNA, 40 bp, synthetic construct
  source 1..40: mol_type = other DNA
gattgagtatgagcagctgcttcacacttgctgaatatgg

SEQ ID NO: 9129 - DNA, 40 bp, synthetic construct
  source 1..40: mol_type = other DNA
gggatcaccgggccgttgtccgccaaaatcatagaccaca

SEQ ID NO: 9130 - DNA, 40 bp, synthetic construct
  source 1..40: mol_type = other DNA
gcccgaagcggtggcacttcactggccaaatccttgcgta

SEQ ID NO: 9131 - DNA, 40 bp, synthetic construct
  source 1..40: mol_type = other DNA
tacgcctccgcgtcacgaagtctgcgcaccgtcctccgaa

SEQ ID NO: 9132 - DNA, 40 bp, synthetic construct
  source 1..40: mol_type = other DNA
tttgggtggatctttgggaactatgggtccgtgtttgata

SEQ ID NO: 9133 - DNA, 40 bp, synthetic construct
  source 1..40: mol_type = other DNA
gaatctgcatcagttgggccctggcgttccatgttactcc

SEQ ID NO: 9134 - DNA, 40 bp, synthetic construct
  source 1..40: mol_type = other DNA
cattggagattccaggagggaagcttctgcgactgaaatc

SEQ ID NO: 9135 - DNA, 40 bp, synthetic construct
  source 1..40: mol_type = other DNA
tccatactgctgttgtcacccatctttcttatgaaggtcg

SEQ ID NO: 9136 - DNA, 40 bp, synthetic construct
  source 1..40: mol_type = other DNA
ggtatcgacctgatattgtttgcctacaaatgctttctca

SEQ ID NO: 9137 - DNA, 40 bp, synthetic construct
  source 1..40: mol_type = other DNA
cctctttgcacaagctacagccttgtggatcacggacaac

SEQ ID NO: 9138 - DNA, 40 bp, synthetic construct
  source 1..40: mol_type = other DNA
tctgcacagatttgctctcccttgacactccgcgttactc

SEQ ID NO: 9139 - DNA, 40 bp, synthetic construct
  source 1..40: mol_type = other DNA
ggatactgtttttgaaggctcttcctgacctgtttgcagt

SEQ ID NO: 9140 - DNA, 40 bp, synthetic construct
  source 1..40: mol_type = other DNA
ctcttggcgatgttgaattcccacgatcccatacacgagg

SEQ ID NO: 9141 - DNA, 40 bp, synthetic construct
  source 1..40: mol_type = other DNA
tgaggcacatcatactgttctgccttcctttcgccactct

SEQ ID NO: 9142 - DNA, 40 bp, synthetic construct
  source 1..40: mol_type = other DNA
ctgattgaactgtgtctccagaggctgcttccgttttata

SEQ ID NO: 9143 - DNA, 40 bp, synthetic construct
  source 1..40: mol_type = other DNA
ttatatcgagaggctgcttctgacgtctgagatcgtcagg

SEQ ID NO: 9144 - DNA, 40 bp, synthetic construct
  source 1..40: mol_type = other DNA
gtggtagttgtcgatgtaaaaccttgtcgttgggatcgca

SEQ ID NO: 9145 - DNA, 40 bp, synthetic construct
  source 1..40: mol_type = other DNA
tcaggacacagcagataagctggtgcgtagtaggtgtcgt

SEQ ID NO: 9146 - DNA, 40 bp, synthetic construct
  source 1..40: mol_type = other DNA
gcaggtgcttgttcacgcagcgggtccgacactttgatgg

SEQ ID NO: 9147 - DNA, 40 bp, synthetic construct
  source 1..40: mol_type = other DNA
ctttcaggcagttctcgttggtccaggctgagcgtcaccg

SEQ ID NO: 9148 - DNA, 40 bp, synthetic construct
  source 1..40: mol_type = other DNA
atgagcttcgggattggctgagaggttttggccgtgctaa

SEQ ID NO: 9149 - DNA, 40 bp, synthetic construct
  source 1..40: mol_type = other DNA
aatctgcttagtggcagatgataggaagttctacgctggg

SEQ ID NO: 9150 - DNA, 40 bp, synthetic construct
  source 1..40: mol_type = other DNA
cgtctcaatttaaaacgctccccgggcgttagccttcatg

SEQ ID NO: 9151 - DNA, 40 bp, synthetic construct
  source 1..40: mol_type = other DNA
gcagcagtagtacccaaagggcttggagtatttgcacttt

SEQ ID NO: 9152 - DNA, 40 bp, synthetic construct
  source 1..40: mol_type = other DNA
gcttgctcagtgccaactcgctttcgccgactccgtcgct

SEQ ID NO: 9153 - DNA, 40 bp, synthetic construct
  source 1..40: mol_type = other DNA
ggtcttcagtgcaaagaggactggaagtgcagacgaaatt

SEQ ID NO: 9154 - DNA, 40 bp, synthetic construct
  source 1..40: mol_type = other DNA
atcaatgggttgaagttgagagcttgctaggatggacgta

SEQ ID NO: 9155 - DNA, 40 bp, synthetic construct
  source 1..40: mol_type = other DNA
tttgctgtagtactttgagcgaatgatatgcaggctaggc

SEQ ID NO: 9156 - DNA, 40 bp, synthetic construct
  source 1..40: mol_type = other DNA
gcaacatagtatctgccgggctgcaagcgtgaaagctgat

SEQ ID NO: 9157 - DNA, 40 bp, synthetic construct
  source 1..40: mol_type = other DNA
ccacctcagatgtttctttaacacgagggagagcttttaa

SEQ ID NO: 9158 - DNA, 40 bp, synthetic construct
  source 1..40: mol_type = other DNA
aattccaagcgttccactctgagaaagaacatgagctgtg

SEQ ID NO: 9159 - DNA, 40 bp, synthetic construct
  source 1..40: mol_type = other DNA
ggagctccagatattaatctttggagatttggtccctcga

SEQ ID NO: 9160 - DNA, 40 bp, synthetic construct
  source 1..40: mol_type = other DNA
ttgacttcatcaagcccaggtggatgcagatagactcgac

SEQ ID NO: 9161 - DNA, 40 bp, synthetic construct
  source 1..40: mol_type = other DNA
gcactgaaagtggccgaggaaagaatcaaaacgaaccgac

SEQ ID NO: 9162 - DNA, 40 bp, synthetic construct
  source 1..40: mol_type = other DNA
cgaaactgaggctggctgtacgaagagccctcctttgatg

SEQ ID NO: 9163 - DNA, 40 bp, synthetic construct
  source 1..40: mol_type = other DNA
cacagcgtcccttaaattctcattgcatccatgattgctt

SEQ ID NO: 9164 - DNA, 40 bp, synthetic construct
  source 1..40: mol_type = other DNA
caatctatctccacgggacaaaaaattccctagcggcttg

SEQ ID NO: 9165 - DNA, 40 bp, synthetic construct
  source 1..40: mol_type = other DNA
gtacaggagatgtggtgagttagccacctagggctacgaa

SEQ ID NO: 9166 - DNA, 40 bp, synthetic construct
  source 1..40: mol_type = other DNA
gcccgcatacctttctcgttccacccgaaaccctctagca

SEQ ID NO: 9167 - DNA, 40 bp, synthetic construct
  source 1..40: mol_type = other DNA
tccaacagctgtgatgtcatgtggcatagaaatgtgccgg

SEQ ID NO: 9168 - DNA, 40 bp, synthetic construct
  source 1..40: mol_type = other DNA
ggcgtcgctatcctcttcctagagtgtggttaagcgcata

SEQ ID NO: 9169 - DNA, 40 bp, synthetic construct
  source 1..40: mol_type = other DNA
gtgctattagcaggtgggtgtctgcttaatagtgacgatg

SEQ ID NO: 9170 - DNA, 40 bp, synthetic construct
  source 1..40: mol_type = other DNA
gaaaccggttttttgagctcgcagttcttggagactccat

SEQ ID NO: 9171 - DNA, 40 bp, synthetic construct
  source 1..40: mol_type = other DNA
atatacaggtactttgccacgcaaaaaatgggaaagggct

SEQ ID NO: 9172 - DNA, 40 bp, synthetic construct
  source 1..40: mol_type = other DNA
ataggaagacgctgagttacatgctgagagtatatcctga

SEQ ID NO: 9173 - DNA, 40 bp, synthetic construct
  source 1..40: mol_type = other DNA
ctagaatcctagttactctcctgagcaaaatccagagaag

SEQ ID NO: 9174 - DNA, 40 bp, synthetic construct
  source 1..40: mol_type = other DNA
ctcaggccgcgctttctcccaagtgcacgggaagcatata

SEQ ID NO: 9175 - DNA, 40 bp, synthetic construct
  source 1..40: mol_type = other DNA
gtgacggatggtggtactgttcctgtccaatgctttaggt

SEQ ID NO: 9176 - DNA, 40 bp, synthetic construct
  source 1..40: mol_type = other DNA
ttcattactctccatctcccttcatgtagccctcaaagtt

SEQ ID NO: 9177 - DNA, 40 bp, synthetic construct
  source 1..40: mol_type = other DNA
agcaattggacttgtggtaacagcttcctgaagtaaccat

SEQ ID NO: 9178 - DNA, 40 bp, synthetic construct
  source 1..40: mol_type = other DNA
ggatgtccatgtgcttctcatgcctctcaagctcaaggtc

SEQ ID NO: 9179 - DNA, 40 bp, synthetic construct
  source 1..40: mol_type = other DNA
gcaaggatcatgggtcacttccagcgtggctgtgatagtt

SEQ ID NO: 9180 - DNA, 40 bp, synthetic construct
  source 1..40: mol_type = other DNA
agggagagttaacgaccctttaagagtcaaagcacctgta

SEQ ID NO: 9181 - DNA, 40 bp, synthetic construct
  source 1..40: mol_type = other DNA
attccaacttccgcctgtacagacagaatcctaaaacctg

SEQ ID NO: 9182 - DNA, 40 bp, synthetic construct
  source 1..40: mol_type = other DNA
cacaggataaaaacacaacctcccaggacactacacaagc

SEQ ID NO: 9183 - DNA, 40 bp, synthetic construct
  source 1..40: mol_type = other DNA
ggacaagctcccgggcttggtcactgagccgctcggaaaa

SEQ ID NO: 9184 - DNA, 40 bp, synthetic construct
  source 1..40: mol_type = other DNA
ggaccctgcaaacagctcctacaacaagccgattgagtta

SEQ ID NO: 9185 - DNA, 40 bp, synthetic construct
  source 1..40: mol_type = other DNA
gcatccttgtcttttccactccttgagcaatttatccacg

SEQ ID NO: 9186 - DNA, 40 bp, synthetic construct
  source 1..40: mol_type = other DNA
tgggttgattttcagcccaaggcaaagcagtctgggatta

SEQ ID NO: 9187 - DNA, 40 bp, synthetic construct
  source 1..40: mol_type = other DNA
gtgagaggatcctttgctgtccctaggcccacaagtagat

SEQ ID NO: 9188 - DNA, 40 bp, synthetic construct
  source 1..40: mol_type = other DNA
agtgtaacgctatcctccagaaaaaacttgcatcggacca

SEQ ID NO: 9189 - DNA, 40 bp, synthetic construct
  source 1..40: mol_type = other DNA
cgttatatgcgcggatcgcaccggctgttacccaactaac

SEQ ID NO: 9190 - DNA, 40 bp, synthetic construct
  source 1..40: mol_type = other DNA
caccagcaagcatgccgagctcgcacgattatgaccacgg

SEQ ID NO: 9191 - DNA, 40 bp, synthetic construct
  source 1..40: mol_type = other DNA
aacccatccacgccagcttgtctctatgtcccgaacctgg

SEQ ID NO: 9192 - DNA, 40 bp, synthetic construct
  source 1..40: mol_type = other DNA
cctcggtgaagacgatgaagcaacggcatcttggtgatgg

SEQ ID NO: 9193 - DNA, 40 bp, synthetic construct
  source 1..40: mol_type = other DNA
ggtgcacatgtacaggacgcgtggtctcgatgccgcggat

SEQ ID NO: 9194 - DNA, 40 bp, synthetic construct
  source 1..40: mol_type = other DNA
gaagacacgcgtgaaaggacagtgaaaagcgcaccaacac

SEQ ID NO: 9195 - DNA, 40 bp, synthetic construct
  source 1..40: mol_type = other DNA
acacagaataaagaaggtccgtgtaacaggttagccatta

SEQ ID NO: 9196 - DNA, 40 bp, synthetic construct
  source 1..40: mol_type = other DNA
atgtctccactggagtttttgtttgatttcctttttgccg

SEQ ID NO: 9197 - DNA, 40 bp, synthetic construct
  source 1..40: mol_type = other DNA
acaccaacgacagtttgaaaatcctttgagccaaagtatc

SEQ ID NO: 9198 - DNA, 40 bp, synthetic construct
  source 1..40: mol_type = other DNA
tggtacaagtgacgacgttcgaggcagcggtaggtgtgtt

SEQ ID NO: 9199 - DNA, 40 bp, synthetic construct
  source 1..40: mol_type = other DNA
cccttgctcaagcagagccctcccgtcacactcagggttg

SEQ ID NO: 9200 - DNA, 40 bp, synthetic construct
  source 1..40: mol_type = other DNA
atgagaatcttctgcagccatgggaagttggatccaatgg

SEQ ID NO: 9201 - DNA, 40 bp, synthetic construct
  source 1..40: mol_type = other DNA
agatgtgcacttctccagttatcaaggcattccttcaccc

SEQ ID NO: 9202 - DNA, 40 bp, synthetic construct
  source 1..40: mol_type = other DNA
atggtgaaaacctgttgtccaaaatgggttaacgtaggct

SEQ ID NO: 9203 - DNA, 40 bp, synthetic construct
  source 1..40: mol_type = other DNA
tgattcccaccacttggagcatgacacatcaagacagatc

SEQ ID NO: 9204 - DNA, 40 bp, synthetic construct
  source 1..40: mol_type = other DNA
tgttcctaggctttcctgtgcgaggaagcggcacttacag

SEQ ID NO: 9205 - DNA, 40 bp, synthetic construct
  source 1..40: mol_type = other DNA
tgtggttgtagggacagttgtgtgtctgcctgatctgggt

SEQ ID NO: 9206 - DNA, 40 bp, synthetic construct
  source 1..40: mol_type = other DNA
tttccagcctatgtgacgagcatctgtaggcggtgaaatc

SEQ ID NO: 9207 - DNA, 40 bp, synthetic construct
  source 1..40: mol_type = other DNA
acgaagttcctgcagttcatctcttcttggctgatctggt

SEQ ID NO: 9208 - DNA, 40 bp, synthetic construct
  source 1..40: mol_type = other DNA
aggcctcatactcaggagaatccttccattcgtggaaacg

SEQ ID NO: 9209 - DNA, 40 bp, synthetic construct
  source 1..40: mol_type = other DNA
gggacaaaatcttcatcatctaggtggactagcatctgat

SEQ ID NO: 9210 - DNA, 40 bp, synthetic construct
  source 1..40: mol_type = other DNA
gcgattcttggttttggcaggtggatggcttccttttgcg

SEQ ID NO: 9211 - DNA, 40 bp, synthetic construct
  source 1..40: mol_type = other DNA
actaggttcagccaaaagcgtcttgggagaattgggcaaa

SEQ ID NO: 9212 - DNA, 40 bp, synthetic construct
  source 1..40: mol_type = other DNA
accactcttcttgacctttcacttacagtctcagtcctaa

SEQ ID NO: 9213 - DNA, 40 bp, synthetic construct
  source 1..40: mol_type = other DNA
ctcgtgcatgtggtagtgatcaggtttcccttcaattgca

SEQ ID NO: 9214 - DNA, 40 bp, synthetic construct
  source 1..40: mol_type = other DNA
ttccagttccgagattgcagccttgacaagaagtggtgta

SEQ ID NO: 9215 - DNA, 40 bp, synthetic construct
  source 1..40: mol_type = other DNA
catgtgttcagggttggcctacattcctaaagaagcagcg

SEQ ID NO: 9216 - DNA, 40 bp, synthetic construct
  source 1..40: mol_type = other DNA
ctagagaagtcatgatgggcgtcctaaagaaggactgttc

SEQ ID NO: 9217 - DNA, 40 bp, synthetic construct
  source 1..40: mol_type = other DNA
tgacatgtcaggtcaaatggcattcagtttagggctttcc

SEQ ID NO: 9218 - DNA, 40 bp, synthetic construct
  source 1..40: mol_type = other DNA
gaggatgaagaattctcgctgtaggagctagtgaaccgtg

SEQ ID NO: 9219 - DNA, 40 bp, synthetic construct
  source 1..40: mol_type = other DNA
cattttcagtggactcgacccagtatttgtcccttaaagg

SEQ ID NO: 9220 - DNA, 40 bp, synthetic construct
  source 1..40: mol_type = other DNA
gcttgactctgtgacttcaatcggtttgttcaggagtact

SEQ ID NO: 9221 - DNA, 40 bp, synthetic construct
  source 1..40: mol_type = other DNA
gcctgttgctgtggtcctgggcccttgcagcaactgaaag

SEQ ID NO: 9222 - DNA, 40 bp, synthetic construct
  source 1..40: mol_type = other DNA
gcccttaacttacacagcttccacgcatcttaacgttact

SEQ ID NO: 9223 - DNA, 40 bp, synthetic construct
  source 1..40: mol_type = other DNA
gggttttcgtgcgggagtctaagtaatccgggactcttaa

SEQ ID NO: 9224 - DNA, 40 bp, synthetic construct
  source 1..40: mol_type = other DNA
tccgaggatggattgaaggtccttatgcaaggcagcgaca

SEQ ID NO: 9225 - DNA, 40 bp, synthetic construct
  source 1..40: mol_type = other DNA
cttaaagctagtgtgtgctccatcttaagtaccctcagga

SEQ ID NO: 9226 - DNA, 40 bp, synthetic construct
  source 1..40: mol_type = other DNA
gtatttccgaagacagcgcaggactgggagtccgggattg

SEQ ID NO: 9227 - DNA, 40 bp, synthetic construct
  source 1..40: mol_type = other DNA
tatatatgtggcatggccaacatgaaggccaaactgagtc

SEQ ID NO: 9228 - DNA, 40 bp, synthetic construct
  source 1..40: mol_type = other DNA
tttgacagaactgtcaggtttcacagtatactctatacgg

SEQ ID NO: 9229 - DNA, 40 bp, synthetic construct
  source 1..40: mol_type = other DNA
ggatattgctattcacagtcaagcacacgaaggttagttg

SEQ ID NO: 9230 - DNA, 40 bp, synthetic construct
  source 1..40: mol_type = other DNA
tcgttcactatggtatctgccatggttcaaaccttcctct

SEQ ID NO: 9231 - DNA, 40 bp, synthetic construct
  source 1..40: mol_type = other DNA
gagcgtcgaggcgcagcacaaggtaggtgagaacggtaaa

SEQ ID NO: 9232 - DNA, 40 bp, synthetic construct
  source 1..40: mol_type = other DNA
tcgggactaacataagccaagctttgtgagcagccaaaac

SEQ ID NO: 9233 - DNA, 40 bp, synthetic construct
  source 1..40: mol_type = other DNA
tttttctgaagctgccacctgtcaacacacgagaaggatt

SEQ ID NO: 9234 - DNA, 40 bp, synthetic construct
  source 1..40: mol_type = other DNA
tgccatcattctgtgaaggccccatgagggtttaggaagg

SEQ ID NO: 9235 - DNA, 40 bp, synthetic construct
  source 1..40: mol_type = other DNA
gcacattagacaaagcagtcgactctttgtgttggtgtct

SEQ ID NO: 9236 - DNA, 40 bp, synthetic construct
  source 1..40: mol_type = other DNA
ttttagggtagttacgctgcctctttggctagtgatatgc

SEQ ID NO: 9237 - DNA, 40 bp, synthetic construct
  source 1..40: mol_type = other DNA
catttatgaaaccaagacccgagttcaggctgtatatacc

SEQ ID NO: 9238 - DNA, 40 bp, synthetic construct
  source 1..40: mol_type = other DNA
ccagtcactcttgaggtactcgcagcggctgcgtcttgca

SEQ ID NO: 9239 - DNA, 40 bp, synthetic construct
  source 1..40: mol_type = other DNA
gaaggaaatggcgttatacgtcatcgttgatgtcccatgt

SEQ ID NO: 9240 - DNA, 40 bp, synthetic construct
  source 1..40: mol_type = other DNA
agtattgagattccgatcgagcaccagagctgaactggtc

SEQ ID NO: 9241 - DNA, 40 bp, synthetic construct
  source 1..40: mol_type = other DNA
gacatgctggtcgctccatccaccaagattccacatggat

SEQ ID NO: 9242 - DNA, 40 bp, synthetic construct
  source 1..40: mol_type = other DNA
gattcctccctgacacattggactgccgtagggatgtggt

SEQ ID NO: 9243 - DNA, 40 bp, synthetic construct
  source 1..40: mol_type = other DNA
tattgcaccgcgaatgatgacaggaacttatgtctatgag

SEQ ID NO: 9244 - DNA, 40 bp, synthetic construct
  source 1..40: mol_type = other DNA
cggacaggatgtatgctgtgcttttgctcctctgcttgga

SEQ ID NO: 9245 - DNA, 40 bp, synthetic construct
  source 1..40: mol_type = other DNA
agcgcgatccctccctccgtgaaaaccggcttttatactc

SEQ ID NO: 9246 - DNA, 40 bp, synthetic construct
  source 1..40: mol_type = other DNA
cccattttcttcctctttcaccagctcgatgaggattaag

SEQ ID NO: 9247 - DNA, 40 bp, synthetic construct
  source 1..40: mol_type = other DNA
gggagtgaatggagcaatgggtttgcctgaattctcacct

SEQ ID NO: 9248 - DNA, 40 bp, synthetic construct
  source 1..40: mol_type = other DNA
ttataaatctctgccatggcgccgatacctcttggcgtac

SEQ ID NO: 9249 - DNA, 40 bp, synthetic construct
  source 1..40: mol_type = other DNA
cttggcctatcttgacccggaatctggatgtcgcagctta

SEQ ID NO: 9250 - DNA, 40 bp, synthetic construct
  source 1..40: mol_type = other DNA
gcatattggagctgggataagtcggagaagtaggtcttca

SEQ ID NO: 9251 - DNA, 40 bp, synthetic construct
  source 1..40: mol_type = other DNA
acttgatgagctgagaggtactcacggaaattgctaaacc

SEQ ID NO: 9252 - DNA, 40 bp, synthetic construct
  source 1..40: mol_type = other DNA
acatctgtcacttcaggtttatgtgactgtatttctgctg

SEQ ID NO: 9253 - DNA, 40 bp, synthetic construct
  source 1..40: mol_type = other DNA
tgtaacatgggctggagttccagtctcctctggacaatcc

SEQ ID NO: 9254 - DNA, 40 bp, synthetic construct
  source 1..40: mol_type = other DNA
atacctgggaataatccacccaacctctacccggtattga

SEQ ID NO: 9255 - DNA, 40 bp, synthetic construct
  source 1..40: mol_type = other DNA
gaatgttggtgattgtgagggtaacccgcgtcggaacgtt

SEQ ID NO: 9256 - DNA, 40 bp, synthetic construct
  source 1..40: mol_type = other DNA
gacgtccaacacagcagagaagagggattgcaatgctcat

SEQ ID NO: 9257 - DNA, 40 bp, synthetic construct
  source 1..40: mol_type = other DNA
taaagggcactcaacagggcgttggatccgttgtgatacg

SEQ ID NO: 9258 - DNA, 40 bp, synthetic construct
  source 1..40: mol_type = other DNA
aatggcttcttgctcgtgtagacaactctgggtcagagtt

SEQ ID NO: 9259 - DNA, 40 bp, synthetic construct
  source 1..40: mol_type = other DNA
acagcaactgcatcttcagaggtgttcctgttgtttgcaa

SEQ ID NO: 9260 - DNA, 40 bp, synthetic construct
  source 1..40: mol_type = other DNA
ctgttccgtcccagtagattcacaaacacgcacctcaaag

SEQ ID NO: 9261 - DNA, 40 bp, synthetic construct
  source 1..40: mol_type = other DNA
tactaaggttcaccaagagggggtgagatttccttttagg

SEQ ID NO: 9262 - DNA, 40 bp, synthetic construct
  source 1..40: mol_type = other DNA
aattcaggttgacaggtgggacaaaggcagtgtagacttt

SEQ ID NO: 9263 - DNA, 40 bp, synthetic construct
  source 1..40: mol_type = other DNA
cacctgagggtaaagcctaccctagaactatactgtgtag

SEQ ID NO: 9264 - DNA, 40 bp, synthetic construct
  source 1..40: mol_type = other DNA
acataggcaccttctccaggcactgaatgctgagcggtat

SEQ ID NO: 9265 - DNA, 40 bp, synthetic construct
  source 1..40: mol_type = other DNA
gtagctgatctttctcttctttgcttggatactaacacct

SEQ ID NO: 9266 - DNA, 40 bp, synthetic construct
  source 1..40: mol_type = other DNA
agccgtctggttctgtactggtccctatttctatcatcac

SEQ ID NO: 9267 - DNA, 40 bp, synthetic construct
  source 1..40: mol_type = other DNA
ggtgatgattcattttcccttttccgtacagtctttggta

SEQ ID NO: 9268 - DNA, 40 bp, synthetic construct
  source 1..40: mol_type = other DNA
tttaactgacaggtccaagtgaaccctgtccaccttagag

SEQ ID NO: 9269 - DNA, 40 bp, synthetic construct
  source 1..40: mol_type = other DNA
atggctaagtgcacagtggttcttggtttctgttgccatc

SEQ ID NO: 9270 - DNA, 40 bp, synthetic construct
  source 1..40: mol_type = other DNA
caactacctggctgtctgtcccatagggaacagaaagttc

SEQ ID NO: 9271 - DNA, 40 bp, synthetic construct
  source 1..40: mol_type = other DNA
cacaaacacgctggcagggagcaccggaaacgggctgttt

SEQ ID NO: 9272 - DNA, 40 bp, synthetic construct
  source 1..40: mol_type = other DNA
caagagtttgttcttcagcctgagtcgtgctggagatgtg

SEQ ID NO: 9273 - DNA, 40 bp, synthetic construct
  source 1..40: mol_type = other DNA
gaagatggcaccattgggctccaactgatagtgaaggttc

SEQ ID NO: 9274 - DNA, 40 bp, synthetic construct
  source 1..40: mol_type = other DNA
tgacattggtcactgataccgccaaagcaaatggcacaga

SEQ ID NO: 9275 - DNA, 40 bp, synthetic construct
  source 1..40: mol_type = other DNA
gacatggagattgggaaaagccagaagaaactccgtggcc

SEQ ID NO: 9276 - DNA, 40 bp, synthetic construct
  source 1..40: mol_type = other DNA
cgcgcgcgctggttagtgagtgtcgcgctcgacgtcgacg

SEQ ID NO: 9277 - DNA, 40 bp, synthetic construct
  source 1..40: mol_type = other DNA
cctttcaggagacttctgggttgcaggtttgcgatgtaag

SEQ ID NO: 9278 - DNA, 40 bp, synthetic construct
  source 1..40: mol_type = other DNA
cttcatggtccaggcgtgcctaggttggtttcttgaagtg

SEQ ID NO: 9279 - DNA, 40 bp, synthetic construct
  source 1..40: mol_type = other DNA
aatccaggagagtttgccagccaccaaaaaaatcaggccc

SEQ ID NO: 9280 - DNA, 40 bp, synthetic construct
  source 1..40: mol_type = other DNA
gctgatgtcatctgttatgtccaggaattgaaaagcccaa

SEQ ID NO: 9281 - DNA, 40 bp, synthetic construct
  source 1..40: mol_type = other DNA
tgcaatccatcccgaaggtgctggcagttgcaggtctctc

SEQ ID NO: 9282 - DNA, 40 bp, synthetic construct
  source 1..40: mol_type = other DNA
ccatgaatctctctgtgtagatcatcctttgttgggagac

SEQ ID NO: 9283 - DNA, 40 bp, synthetic construct
  source 1..40: mol_type = other DNA
gggcactgatactcaaacactgtatgcccgatagggcacg

SEQ ID NO: 9284 - DNA, 40 bp, synthetic construct
  source 1..40: mol_type = other DNA
agctgccaaccatgttgatacactggacattcacatcgga

SEQ ID NO: 9285 - DNA, 40 bp, synthetic construct
  source 1..40: mol_type = other DNA
tgatgacgatgtgcttcagcggctccgaagctgctgccgt

SEQ ID NO: 9286 - DNA, 40 bp, synthetic construct
  source 1..40: mol_type = other DNA
ttggatgacatccagagtggagacattcatggaaagccat

SEQ ID NO: 9287 - DNA, 40 bp, synthetic construct
  source 1..40: mol_type = other DNA
tgtcttctacagagtggatgctgagcagccaatttgtgtc

SEQ ID NO: 9288 - DNA, 40 bp, synthetic construct
  source 1..40: mol_type = other DNA
cagaacttgtcggtgatgagtctccacacccgatgtaccc

SEQ ID NO: 9289 - DNA, 40 bp, synthetic construct
  source 1..40: mol_type = other DNA
aattacccttccataggacatagctacaaggtcagtatca

SEQ ID NO: 9290 - DNA, 40 bp, synthetic construct
  source 1..40: mol_type = other DNA
acgtctgagatgcacacagcagcggaggacgtaccaaccg

SEQ ID NO: 9291 - DNA, 40 bp, synthetic construct
  source 1..40: mol_type = other DNA
ccagaactcgggagccggttcctcgagccgggcgaaatgc

SEQ ID NO: 9292 - DNA, 40 bp, synthetic construct
  source 1..40: mol_type = other DNA
tttttactccagggttccaatctccaacacgtggcagccg

SEQ ID NO: 9293 - DNA, 40 bp, synthetic construct
  source 1..40: mol_type = other DNA
tgggcagcagtctggagggtctgtttgccgtagcgtcgcc

SEQ ID NO: 9294 - DNA, 40 bp, synthetic construct
  source 1..40: mol_type = other DNA
ctcacagctgtaggccatttggaggagatgtccatttgct

SEQ ID NO: 9295 - DNA, 40 bp, synthetic construct
  source 1..40: mol_type = other DNA
ctctcatacattcctgttacccacaagttttggcacccaa

SEQ ID NO: 9296 - DNA, 40 bp, synthetic construct
  source 1..40: mol_type = other DNA
agtctgaccagctaaagtatgaagccgggactgctccacc

SEQ ID NO: 9297 - DNA, 40 bp, synthetic construct
  source 1..40: mol_type = other DNA
acatttggctccacacatagagcagacctttgtctgcata

SEQ ID NO: 9298 - DNA, 40 bp, synthetic construct
  source 1..40: mol_type = other DNA
aaataggcctgcctttcatcatgtgtgtgttcttgtgatg

SEQ ID NO: 9299 - DNA, 40 bp, synthetic construct
  source 1..40: mol_type = other DNA
ggtggactttcttctttggtgattccagttaggaaccaag

SEQ ID NO: 9300 - DNA, 40 bp, synthetic construct
  source 1..40: mol_type = other DNA
aagggtggactttcttctttgctgattccagttaggaacc

SEQ ID NO: 9301 - DNA, 40 bp, synthetic construct
  source 1..40: mol_type = other DNA
agcacacccgggctggatcgcgggagcctgtttcgggtgc

SEQ ID NO: 9302 - DNA, 40 bp, synthetic construct
  source 1..40: mol_type = other DNA
aatgtaggactggtccgtcactgaactcaggtaaaacatc

SEQ ID NO: 9303 - DNA, 40 bp, synthetic construct
  source 1..40: mol_type = other DNA
tcgacaactagagccatgttgttgatcatcatagtaggtg

SEQ ID NO: 9304 - DNA, 40 bp, synthetic construct
  source 1..40: mol_type = other DNA
tcggcaaattcgtaagcagcaaaaccggacttcatctctg

SEQ ID NO: 9305 - DNA, 40 bp, synthetic construct
  source 1..40: mol_type = other DNA
cccatcattcttcaggttgtctccgcttttcaacttgcct

SEQ ID NO: 9306 - DNA, 40 bp, synthetic construct
  source 1..40: mol_type = other DNA
taccgttggtttcttaagtgatcaggactgtggtaagatt

SEQ ID NO: 9307 - DNA, 40 bp, synthetic construct
  source 1..40: mol_type = other DNA
ccattttggcacggatgccgttccatttatgcacgtgccc

SEQ ID NO: 9308 - DNA, 40 bp, synthetic construct
  source 1..40: mol_type = other DNA
catggccaccctgcaggtgccacgtacttgatgaggtcgg

SEQ ID NO: 9309 - DNA, 40 bp, synthetic construct
  source 1..40: mol_type = other DNA
tttaccctatgtaaggcaagacgtttggcatttcttggtc

SEQ ID NO: 9310 - DNA, 40 bp, synthetic construct
  source 1..40: mol_type = other DNA
ttttgtccacaaagaggaaccactgggctgttgatgaagt

SEQ ID NO: 9311 - DNA, 40 bp, synthetic construct
  source 1..40: mol_type = other DNA
gatgtcatctgtcccaacatgcattggattcttcaatggc

SEQ ID NO: 9312 - DNA, 40 bp, synthetic construct
  source 1..40: mol_type = other DNA
gatgcttgtgaatgcctcaagcagtgagccagtatccttg

SEQ ID NO: 9313 - DNA, 40 bp, synthetic construct
  source 1..40: mol_type = other DNA
tgggatctccacttcattctcgttccttcatcgtgggtga

SEQ ID NO: 9314 - DNA, 40 bp, synthetic construct
  source 1..40: mol_type = other DNA
tgccttcaagctcattctctcacatagatgtaaatgtgcc

SEQ ID NO: 9315 - DNA, 40 bp, synthetic construct
  source 1..40: mol_type = other DNA
gcatcagaatccacctccctggagtctgtagacatagtag

SEQ ID NO: 9316 - DNA, 40 bp, synthetic construct
  source 1..40: mol_type = other DNA
cggcagtatagaggacggaggtcaccctcattgggctgca

SEQ ID NO: 9317 - DNA, 40 bp, synthetic construct
  source 1..40: mol_type = other DNA
cagttaggatcaatgcttccggaccactgctaccacatca

SEQ ID NO: 9318 - DNA, 40 bp, synthetic construct
  source 1..40: mol_type = other DNA
ggtagattctgaggtctgcaacggtgaccagttcactctt

SEQ ID NO: 9319 - DNA, 40 bp, synthetic construct
  source 1..40: mol_type = other DNA
gtagcgatggtagcggatccactgccgccgacctgccatg

SEQ ID NO: 9320 - DNA, 40 bp, synthetic construct
  source 1..40: mol_type = other DNA
gttctggatttcttcgaaggacatcttgcatccatggatg

SEQ ID NO: 9321 - DNA, 40 bp, synthetic construct
  source 1..40: mol_type = other DNA
gaacgctgatgctgtttctggtctgaagtgctcgcgatgg

SEQ ID NO: 9322 - DNA, 40 bp, synthetic construct
  source 1..40: mol_type = other DNA
ccagcatcaaaagagtgactatcatcaccattttggttcc

SEQ ID NO: 9323 - DNA, 40 bp, synthetic construct
  source 1..40: mol_type = other DNA
tttgcctccgatggtttccatatacgaagactctgagctg

SEQ ID NO: 9324 - DNA, 40 bp, synthetic construct
  source 1..40: mol_type = other DNA
gagcttccaaggaaagccaatcatttcccacatcacgtaa

SEQ ID NO: 9325 - DNA, 40 bp, synthetic construct
  source 1..40: mol_type = other DNA
catacactgattatccaggtaaatgctgattctggtgcaa

SEQ ID NO: 9326 - DNA, 40 bp, synthetic construct
  source 1..40: mol_type = other DNA
ctccaatggagcaacagtttgatatttaggtgggagacta

SEQ ID NO: 9327 - DNA, 40 bp, synthetic construct
  source 1..40: mol_type = other DNA
catggcttagtttgattctgtcatctcgattaccctcata

SEQ ID NO: 9328 - DNA, 40 bp, synthetic construct
  source 1..40: mol_type = other DNA
ccaatctgcttcatgccaatgacatgaagagagacatact

SEQ ID NO: 9329 - DNA, 40 bp, synthetic construct
  source 1..40: mol_type = other DNA
ggtcatgcgattctgtgctgacaacaggaaggttaaggtg

SEQ ID NO: 9330 - DNA, 40 bp, synthetic construct
  source 1..40: mol_type = other DNA
ctccaggagaatttcagccaccttggctgaacctaccgac

SEQ ID NO: 9331 - DNA, 40 bp, synthetic construct
  source 1..40: mol_type = other DNA
tcccgaccatagattagggattcttaaccctgatgctgtc

SEQ ID NO: 9332 - DNA, 40 bp, synthetic construct
  source 1..40: mol_type = other DNA
cagacccacacattgttgacgaggtttctgggttcctacc

SEQ ID NO: 9333 - DNA, 40 bp, synthetic construct
  source 1..40: mol_type = other DNA
cgaacccattggctggatttagggttttggaaacattcca

SEQ ID NO: 9334 - DNA, 40 bp, synthetic construct
  source 1..40: mol_type = other DNA
taaagccgaccgtggagtcatgcactctgaactgttttgg

SEQ ID NO: 9335 - DNA, 40 bp, synthetic construct
  source 1..40: mol_type = other DNA
tccaacgatgtttaaaggcatttaaggtgactctggtagt

SEQ ID NO: 9336 - DNA, 40 bp, synthetic construct
  source 1..40: mol_type = other DNA
tccactaagtccctcgaaccggcattgaagggatgagaac

SEQ ID NO: 9337 - DNA, 40 bp, synthetic construct
  source 1..40: mol_type = other DNA
gctgtctctgattgtgctgaggcccaattttctccatcag

SEQ ID NO: 9338 - DNA, 40 bp, synthetic construct
  source 1..40: mol_type = other DNA
tctgtgtcacaggtggagtttacagatgtcatacatccca

SEQ ID NO: 9339 - DNA, 40 bp, synthetic construct
  source 1..40: mol_type = other DNA
tccataattatccacctggattcacagcattgagctgggt

SEQ ID NO: 9340 - DNA, 40 bp, synthetic construct
  source 1..40: mol_type = other DNA
gcggcatttcccaatgactgcatccactgtacttaaatgg

SEQ ID NO: 9341 - DNA, 40 bp, synthetic construct
  source 1..40: mol_type = other DNA
caatccagtccagaaatgggacattgcgcgtctcagtgga

SEQ ID NO: 9342 - DNA, 40 bp, synthetic construct
  source 1..40: mol_type = other DNA
acgcaaagccacttgtgcatgcatagcttagcgcagattc

SEQ ID NO: 9343 - DNA, 40 bp, synthetic construct
  source 1..40: mol_type = other DNA
gccctgtagtgaaacacaacgtgtgtacctgctggttgcc

SEQ ID NO: 9344 - DNA, 40 bp, synthetic construct
  source 1..40: mol_type = other DNA
attacgacagggattagagtccatcaacacaagtggctcc

SEQ ID NO: 9345 - DNA, 40 bp, synthetic construct
  source 1..40: mol_type = other DNA
cacgcatctggcgttccaggggcaaagttctcttccattt

SEQ ID NO: 9346 - DNA, 40 bp, synthetic construct
  source 1..40: mol_type = other DNA
gatggcgtcggccagcgagagtgttcttgaactcggtgtt

SEQ ID NO: 9347 - DNA, 40 bp, synthetic construct
  source 1..40: mol_type = other DNA
ggacaatggtgccgcccaccccctgggaaactcagctgct

SEQ ID NO: 9348 - DNA, 40 bp, synthetic construct
  source 1..40: mol_type = other DNA
gaaggtcaggtacatgaaagttgtcgtcgtcctcgaggaa

SEQ ID NO: 9349 - DNA, 40 bp, synthetic construct
  source 1..40: mol_type = other DNA
gtgcgatgctttctgtgactgttgaggcagctgtgaaaga

SEQ ID NO: 9350 - DNA, 40 bp, synthetic construct
  source 1..40: mol_type = other DNA
gtgttattcacttatgcctgctcttcttcgttacagcaga

SEQ ID NO: 9351 - DNA, 40 bp, synthetic construct
  source 1..40: mol_type = other DNA
gggtgaaattggcaaagacatgggctgatagtcagcagct

SEQ ID NO: 9352 - DNA, 40 bp, synthetic construct
  source 1..40: mol_type = other DNA
cactgttgagactcttgacagacctcatagaggtagctgg

SEQ ID NO: 9353 - DNA, 40 bp, synthetic construct
  source 1..40: mol_type = other DNA
agcctcaaagcttggccaggttaccattgctcagtgacag

SEQ ID NO: 9354 - DNA, 40 bp, synthetic construct
  source 1..40: mol_type = other DNA
ctatagctcgcgagcctctgacttgctgctggtgattctt

SEQ ID NO: 9355 - DNA, 40 bp, synthetic construct
  source 1..40: mol_type = other DNA
ggcccttcaaggagcgggtgctgctgtgtggtagaatctg

SEQ ID NO: 9356 - DNA, 40 bp, synthetic construct
  source 1..40: mol_type = other DNA
caactgaaccaaacagatcttggtatgtcaggcttctcag

SEQ ID NO: 9357 - DNA, 40 bp, synthetic construct
  source 1..40: mol_type = other DNA
cggaagaacaccgagagataagcgcttggtgatgtgcttt

SEQ ID NO: 9358 - DNA, 40 bp, synthetic construct
  source 1..40: mol_type = other DNA
gtccaacctgttagagctactctgtcacctgcatagcttg

SEQ ID NO: 9359 - DNA, 40 bp, synthetic construct
  source 1..40: mol_type = other DNA
ccatgaaatgactactaggtcatagaatcctcccaacaac

SEQ ID NO: 9360 - DNA, 40 bp, synthetic construct
  source 1..40: mol_type = other DNA
cgtgacctcatcttgacacattgtctccgatgtaatcgtc

SEQ ID NO: 9361 - DNA, 40 bp, synthetic construct
  source 1..40: mol_type = other DNA
gactgacctgctctctggcttcttgacgcattgtaggttg

SEQ ID NO: 9362 - DNA, 40 bp, synthetic construct
  source 1..40: mol_type = other DNA
tgtcagcatactgccgcgggcacgcggagagccttgaccg

SEQ ID NO: 9363 - DNA, 40 bp, synthetic construct
  source 1..40: mol_type = other DNA
caggaaaaggcaggcgagtgggaaggcgcgaacctgttcg

SEQ ID NO: 9364 - DNA, 40 bp, synthetic construct
  source 1..40: mol_type = other DNA
aaatggccaacagaacaacccaagaagaataatgcgacga

SEQ ID NO: 9365 - DNA, 40 bp, synthetic construct
  source 1..40: mol_type = other DNA
gtaggccttgttgggcccaacagcactttcttctggaatg

SEQ ID NO: 9366 - DNA, 40 bp, synthetic construct
  source 1..40: mol_type = other DNA
agtcacagctgagaccttcccagaagatcagataagccaa

SEQ ID NO: 9367 - DNA, 40 bp, synthetic construct
  source 1..40: mol_type = other DNA
ctatcactaccaaggcaatctattagaatcaccaagggca

SEQ ID NO: 9368 - DNA, 40 bp, synthetic construct
  source 1..40: mol_type = other DNA
gttgctgggttcttaacacaatattgtactaggctcctgg

SEQ ID NO: 9369 - DNA, 40 bp, synthetic construct
  source 1..40: mol_type = other DNA
aacaactcagctgtgagaggggactttacaaaacagactc

SEQ ID NO: 9370 - DNA, 40 bp, synthetic construct
  source 1..40: mol_type = other DNA
tgtgttgggtcttcctgcgactgggcagttataggtccca

SEQ ID NO: 9371 - DNA, 40 bp, synthetic construct
  source 1..40: mol_type = other DNA
gtcacattgaaaagcttctctgttgattctcagtgtgctg

SEQ ID NO: 9372 - DNA, 40 bp, synthetic construct
  source 1..40: mol_type = other DNA
ggattacgtctcctccaaatagatcagaagttccaatgct

SEQ ID NO: 9373 - DNA, 40 bp, synthetic construct
  source 1..40: mol_type = other DNA
atcaaacaagccctgctcgtacccgcaggatgctgtgcac

SEQ ID NO: 9374 - DNA, 40 bp, synthetic construct
  source 1..40: mol_type = other DNA
agagaagatcacaaggatgcgtgaaaacaaggaacattcc

SEQ ID NO: 9375 - DNA, 40 bp, synthetic construct
  source 1..40: mol_type = other DNA
taaggttgaccgcattgtcgattgtaggaatacttgcagc

SEQ ID NO: 9376 - DNA, 40 bp, synthetic construct
  source 1..40: mol_type = other DNA
catttgaccaaatccctcatattgctttgagggaatccct

SEQ ID NO: 9377 - DNA, 40 bp, synthetic construct
  source 1..40: mol_type = other DNA
cacaaagaccatcaagaggcatatagaaaacgagcagtgc

SEQ ID NO: 9378 - DNA, 40 bp, synthetic construct
  source 1..40: mol_type = other DNA
tgagttcgaagatgcagaggccagatgttgaccacatggc

SEQ ID NO: 9379 - DNA, 40 bp, synthetic construct
  source 1..40: mol_type = other DNA
actctctgcttgcaaagtctagcacagatttgattccacg

SEQ ID NO: 9380 - DNA, 40 bp, synthetic construct
  source 1..40: mol_type = other DNA
gccatgtaacttggacttctcagcttgaggtttcagtggg

SEQ ID NO: 9381 - DNA, 40 bp, synthetic construct
  source 1..40: mol_type = other DNA
ggacagaagagtttgtgtttgattacagaggtctgtgact

SEQ ID NO: 9382 - DNA, 40 bp, synthetic construct
  source 1..40: mol_type = other DNA
ctgaacctcatcatttcgccatcgcctttgagggaagact

SEQ ID NO: 9383 - DNA, 40 bp, synthetic construct
  source 1..40: mol_type = other DNA
acgccaagacagagttgggcggatcaggaccaggatactg

SEQ ID NO: 9384 - DNA, 40 bp, synthetic construct
  source 1..40: mol_type = other DNA
cgcagttggccatagggctccccggacaccgggctgaact

SEQ ID NO: 9385 - DNA, 40 bp, synthetic construct
  source 1..40: mol_type = other DNA
gtcaccgaactatcagcctgcatccagtagataaagccag

SEQ ID NO: 9386 - DNA, 40 bp, synthetic construct
  source 1..40: mol_type = other DNA
gagtgcgtctctagcactttaactggaaacaccctgccta

SEQ ID NO: 9387 - DNA, 40 bp, synthetic construct
  source 1..40: mol_type = other DNA
tactgatgatgcttcaaagggccagctgtgagggtgtgac

SEQ ID NO: 9388 - DNA, 40 bp, synthetic construct
  source 1..40: mol_type = other DNA
gactcccagcgtcagctccaccgctgtgctgtattatgaa

SEQ ID NO: 9389 - DNA, 40 bp, synthetic construct
  source 1..40: mol_type = other DNA
ctctctggatgtctgcatcaggccttgtcttttcatagga

SEQ ID NO: 9390 - DNA, 40 bp, synthetic construct
  source 1..40: mol_type = other DNA
catctgttgccaaaccactgtttggcgatatccctcatgc

SEQ ID NO: 9391 - DNA, 40 bp, synthetic construct
  source 1..40: mol_type = other DNA
gcggcaggttatattcaaatacgtggaatacacctgcaaa

SEQ ID NO: 9392 - DNA, 40 bp, synthetic construct
  source 1..40: mol_type = other DNA
aaagcatggaatgacgacagtgtgcctccatattagtaac

SEQ ID NO: 9393 - DNA, 40 bp, synthetic construct
  source 1..40: mol_type = other DNA
gtcccttagagggttccctcctggcacaatcacctttgag

SEQ ID NO: 9394 - DNA, 40 bp, synthetic construct
  source 1..40: mol_type = other DNA
taaaggcgagtgggaaggaggcccgtcagcttttcaactg

SEQ ID NO: 9395 - DNA, 40 bp, synthetic construct
  source 1..40: mol_type = other DNA
tttctgccactattttcctcctcgggcttgtgactcaggt

SEQ ID NO: 9396 - DNA, 40 bp, synthetic construct
  source 1..40: mol_type = other DNA
ttgtccaagggtgacgaaagctgttccgacttggtttgtc

SEQ ID NO: 9397 - DNA, 40 bp, synthetic construct
  source 1..40: mol_type = other DNA
tgacagatcagggaggagggttattatcactaagtggccc

SEQ ID NO: 9398 - DNA, 40 bp, synthetic construct
  source 1..40: mol_type = other DNA
cattttcttctccttttgccccagacatcatagtcagcac

SEQ ID NO: 9399 - DNA, 40 bp, synthetic construct
  source 1..40: mol_type = other DNA
ttgcgtccacttctggtctatgtgattatcccagcttaag

SEQ ID NO: 9400 - DNA, 40 bp, synthetic construct
  source 1..40: mol_type = other DNA
gtatagatgagcaggtcaaacttaggttctgggtaaccgt

SEQ ID NO: 9401 - DNA, 40 bp, synthetic construct
  source 1..40: mol_type = other DNA
cagatgcataagcacagcagctgtagctccaaaaagagac

SEQ ID NO: 9402 - DNA, 40 bp, synthetic construct
  source 1..40: mol_type = other DNA
tcacaggcgaagtccagcccagggcgcccagatgtagata

SEQ ID NO: 9403 - DNA, 40 bp, synthetic construct
  source 1..40: mol_type = other DNA
ttaagcaaggaagtgcatgtggcattgcttgtaccatacc

SEQ ID NO: 9404 - DNA, 40 bp, synthetic construct
  source 1..40: mol_type = other DNA
ccgctgttctttgtagtgattggtgtggcaggcataggat

SEQ ID NO: 9405 - DNA, 40 bp, synthetic construct
  source 1..40: mol_type = other DNA
tttctggtaagtgtctggtgcatttgttggaagacagaca

SEQ ID NO: 9406 - DNA, 40 bp, synthetic construct
  source 1..40: mol_type = other DNA
ggccgttgtgcttcacaagagttttcttcaggacaaggta

SEQ ID NO: 9407 - DNA, 40 bp, synthetic construct
  source 1..40: mol_type = other DNA
agtcattcatgatgtccctagcccttgacaatgtagttgg

SEQ ID NO: 9408 - DNA, 40 bp, synthetic construct
  source 1..40: mol_type = other DNA
gttggtgctgaggatgctgcgtgttttggaaggtagcgtt

SEQ ID NO: 9409 - DNA, 40 bp, synthetic construct
  source 1..40: mol_type = other DNA
cagacttcagtcacctggctccatcatgtaggttgccgca

SEQ ID NO: 9410 - DNA, 40 bp, synthetic construct
  source 1..40: mol_type = other DNA
ctccacaaaacttccctgggtgtattagtgtcctgagctc

SEQ ID NO: 9411 - DNA, 40 bp, synthetic construct
  source 1..40: mol_type = other DNA
gtacaccatgattcacattcatcaccatagccaaccacaa

SEQ ID NO: 9412 - DNA, 40 bp, synthetic construct
  source 1..40: mol_type = other DNA
ccgtcactaacctctaactgtgtgtagggtgtcctgaacc

SEQ ID NO: 9413 - DNA, 40 bp, synthetic construct
  source 1..40: mol_type = other DNA
cctgtacaccctggccttcaacccaagccaaaactgatcc

SEQ ID NO: 9414 - DNA, 40 bp, synthetic construct
  source 1..40: mol_type = other DNA
gctggtaaggactgtgaggcgggactgtctaaggtgctct

SEQ ID NO: 9415 - DNA, 40 bp, synthetic construct
  source 1..40: mol_type = other DNA
ggattgagtccgtttatgttacacattgtagtgggcagtg

SEQ ID NO: 9416 - DNA, 40 bp, synthetic construct
  source 1..40: mol_type = other DNA
ttacattatcccagacacctacaaagccaaagcaccagtt

SEQ ID NO: 9417 - DNA, 40 bp, synthetic construct
  source 1..40: mol_type = other DNA
cgccagatccaagcaccttccttgtagactgtgccaaaag

SEQ ID NO: 9418 - DNA, 40 bp, synthetic construct
  source 1..40: mol_type = other DNA
ccgtggaatgtcacgttcttagaacgcatccagtaggacc

SEQ ID NO: 9419 - DNA, 40 bp, synthetic construct
  source 1..40: mol_type = other DNA
cttggagttgatgtcagtcagtcttcctcaattccaatcc

SEQ ID NO: 9420 - DNA, 40 bp, synthetic construct
  source 1..40: mol_type = other DNA
catgtggtcaatgacgaactcgccctgccttgtttgcgtc

SEQ ID NO: 9421 - DNA, 40 bp, synthetic construct
  source 1..40: mol_type = other DNA
ctcttgtgtccttcaagtaggcttcttagtgagcttttct

SEQ ID NO: 9422 - DNA, 40 bp, synthetic construct
  source 1..40: mol_type = other DNA
aaacctcggcttcctccatacaggtttactctcgcagtta

SEQ ID NO: 9423 - DNA, 40 bp, synthetic construct
  source 1..40: mol_type = other DNA
tctcactgtgacagcaggagccgtaagtgatcctgtaata

SEQ ID NO: 9424 - DNA, 40 bp, synthetic construct
  source 1..40: mol_type = other DNA
tgaacggtaacactgattgcaaaccctcaacggcaactgg

SEQ ID NO: 9425 - DNA, 40 bp, synthetic construct
  source 1..40: mol_type = other DNA
cgccggactcttagaagctaaatagggacaagacagatgc

SEQ ID NO: 9426 - DNA, 40 bp, synthetic construct
  source 1..40: mol_type = other DNA
tgaggtcctcacagatctgctgtagaaggtatacacaacc

SEQ ID NO: 9427 - DNA, 40 bp, synthetic construct
  source 1..40: mol_type = other DNA
agatcttgttctctcaccaggtctgccttgaacacagaag

SEQ ID NO: 9428 - DNA, 40 bp, synthetic construct
  source 1..40: mol_type = other DNA
gcatcctcataacctttctctacactgacttgccgtttca

SEQ ID NO: 9429 - DNA, 40 bp, synthetic construct
  source 1..40: mol_type = other DNA
ttggctacattccaggaaatgaaatctggaacgaatgtct

SEQ ID NO: 9430 - DNA, 40 bp, synthetic construct
  source 1..40: mol_type = other DNA
atgccagaaatctataggagaacgacaactgagagagagg

SEQ ID NO: 9431 - DNA, 40 bp, synthetic construct
  source 1..40: mol_type = other DNA
tttggtgcaggctcgtggagcagtgtacaaagcttgagac

SEQ ID NO: 9432 - DNA, 40 bp, synthetic construct
  source 1..40: mol_type = other DNA
ctggagggagatgaaggaggactccttccagaaacaaatg

SEQ ID NO: 9433 - DNA, 40 bp, synthetic construct
  source 1..40: mol_type = other DNA
tcttatgtggagcatcttgagatctaagagaggttttgga

SEQ ID NO: 9434 - DNA, 40 bp, synthetic construct
  source 1..40: mol_type = other DNA
ttccaggctttgtggcaacacttggttaacagggtgtaga

SEQ ID NO: 9435 - DNA, 40 bp, synthetic construct
  source 1..40: mol_type = other DNA
tgcctattctgatggttgctgatccctgctccgatgtaga

SEQ ID NO: 9436 - DNA, 40 bp, synthetic construct
  source 1..40: mol_type = other DNA
aaatctcaacattccaagggggcagtgctcaaataagcct

SEQ ID NO: 9437 - DNA, 40 bp, synthetic construct
  source 1..40: mol_type = other DNA
tgatttccaggttggctttgatagttggagcgctttgtca

SEQ ID NO: 9438 - DNA, 40 bp, synthetic construct
  source 1..40: mol_type = other DNA
gaagccacgtgacattgaccggtgacaggttttccatttc

SEQ ID NO: 9439 - DNA, 40 bp, synthetic construct
  source 1..40: mol_type = other DNA
gccacacagtgctttgctgtaaacactcaccgcttattca

SEQ ID NO: 9440 - DNA, 40 bp, synthetic construct
  source 1..40: mol_type = other DNA
gaaagacgctgctttggcctcagcaggacgtcaaagcact

SEQ ID NO: 9441 - DNA, 40 bp, synthetic construct
  source 1..40: mol_type = other DNA
ccaaaggacttaactgatctttgtatcaagctgatcaggt

SEQ ID NO: 9442 - DNA, 40 bp, synthetic construct
  source 1..40: mol_type = other DNA
gggaacacatccggagccttgtctgcaccctgatatgatg

SEQ ID NO: 9443 - DNA, 40 bp, synthetic construct
  source 1..40: mol_type = other DNA
gggactgaaacccgtggcctcaggacacctgaatctgccg

SEQ ID NO: 9444 - DNA, 40 bp, synthetic construct
  source 1..40: mol_type = other DNA
gcatgcacacacagagcggccccgttgacacggttagttt

SEQ ID NO: 9445 - DNA, 40 bp, synthetic construct
  source 1..40: mol_type = other DNA
ttggatctgttagcctctggcatgacaccatggactccca

SEQ ID NO: 9446 - DNA, 40 bp, synthetic construct
  source 1..40: mol_type = other DNA
tgacgttggtcacggtgaaagacaaaggcaaagaagatga

SEQ ID NO: 9447 - DNA, 40 bp, synthetic construct
  source 1..40: mol_type = other DNA
ccaccctgatgtctcagttttcctagagtctatagagtcg

SEQ ID NO: 9448 - DNA, 40 bp, synthetic construct
  source 1..40: mol_type = other DNA
tcaccctatggaaacagcttcactcaaataccatagtgtg

SEQ ID NO: 9449 - DNA, 40 bp, synthetic construct
  source 1..40: mol_type = other DNA
tcgagaacttggaattttggagtcttgaaggcatgtgaaa

SEQ ID NO: 9450 - DNA, 40 bp, synthetic construct
  source 1..40: mol_type = other DNA
ggccttaatctccaaaggaatggtctgttgatctctgagg

SEQ ID NO: 9451 - DNA, 40 bp, synthetic construct
  source 1..40: mol_type = other DNA
ggtttggtatctgccagttttgtgccttgtgcctcgaaga

SEQ ID NO: 9452 - DNA, 40 bp, synthetic construct
  source 1..40: mol_type = other DNA
cgaatgacagagggtttctttgctcatcagaatgtgggag

SEQ ID NO: 9453 - DNA, 40 bp, synthetic construct
  source 1..40: mol_type = other DNA
acttgtttcgttgtgttccggttcttcaggttgaggtgtc

SEQ ID NO: 9454 - DNA, 40 bp, synthetic construct
  source 1..40: mol_type = other DNA
catcgcgccggaggatgtggtgccgtcagcctctttttgg

SEQ ID NO: 9455 - DNA, 40 bp, synthetic construct
  source 1..40: mol_type = other DNA
cctgtgattaacgagggagttgagcctaaattcgtgggat

SEQ ID NO: 9456 - DNA, 40 bp, synthetic construct
  source 1..40: mol_type = other DNA
ggagcagctcacaggtttggccaggatgcttgactcacgg

SEQ ID NO: 9457 - DNA, 40 bp, synthetic construct
  source 1..40: mol_type = other DNA
gcgcagaatgagatgagttgtgcaggaactccttaaagct

SEQ ID NO: 9458 - DNA, 40 bp, synthetic construct
  source 1..40: mol_type = other DNA
cgcaggcacggctctaggctagctagaaggaaactacgga

SEQ ID NO: 9459 - DNA, 40 bp, synthetic construct
  source 1..40: mol_type = other DNA
agtagtcatccagttctgcactggctatagcatgagaatg

SEQ ID NO: 9460 - DNA, 40 bp, synthetic construct
  source 1..40: mol_type = other DNA
cctatttgagacttgactcccatgagattttgtggagcct

SEQ ID NO: 9461 - DNA, 40 bp, synthetic construct
  source 1..40: mol_type = other DNA
tgtagactcagcccaatatctcagatctgtgaagacacgc

SEQ ID NO: 9462 - DNA, 40 bp, synthetic construct
  source 1..40: mol_type = other DNA
gacaggtcaagcgggaagaagcgtggacaccttccggtag

SEQ ID NO: 9463 - DNA, 40 bp, synthetic construct
  source 1..40: mol_type = other DNA
ctgtcacgttgaactcccggaccatcatttctcacagtca

SEQ ID NO: 9464 - DNA, 40 bp, synthetic construct
  source 1..40: mol_type = other DNA
atttggtgaattgttcgtggagactctgagaagttgaggt

SEQ ID NO: 9465 - DNA, 40 bp, synthetic construct
  source 1..40: mol_type = other DNA
ggtccatcccgtcctgctgcatccacatagatgaggtagc

SEQ ID NO: 9466 - DNA, 40 bp, synthetic construct
  source 1..40: mol_type = other DNA
ccctcaaagcccgggtggcatctcgcactggcacgctgag

SEQ ID NO: 9467 - DNA, 40 bp, synthetic construct
  source 1..40: mol_type = other DNA
tgggtagcagtaactatctgcttcatcacagatattgctc

SEQ ID NO: 9468 - DNA, 40 bp, synthetic construct
  source 1..40: mol_type = other DNA
tagggccaactcgtcatcctctcagcaagtcttctaagtc

SEQ ID NO: 9469 - DNA, 40 bp, synthetic construct
  source 1..40: mol_type = other DNA
ctgttattccaagggttgactggtggaacaatcagctaga

SEQ ID NO: 9470 - DNA, 40 bp, synthetic construct
  source 1..40: mol_type = other DNA
gggctgtaaaataggtgaaaggagatatattggttgcggg

SEQ ID NO: 9471 - DNA, 40 bp, synthetic construct
  source 1..40: mol_type = other DNA
agtaaatgctggctcaatacagttctatgttgggtcctgg

SEQ ID NO: 9472 - DNA, 40 bp, synthetic construct
  source 1..40: mol_type = other DNA
aataccattcacggttccaggagatcaaagtcaaagtgag

SEQ ID NO: 9473 - DNA, 40 bp, synthetic construct
  source 1..40: mol_type = other DNA
atgacaacactggatgaccgccattttgactaaccaatgc

SEQ ID NO: 9474 - DNA, 40 bp, synthetic construct
  source 1..40: mol_type = other DNA
agatcatgtcattcacttgctgaatgaacgaaggtaggtt

SEQ ID NO: 9475 - DNA, 40 bp, synthetic construct
  source 1..40: mol_type = other DNA
tgccaatgtgacagtggcattgaggctgacctgtgatgat

SEQ ID NO: 9476 - DNA, 40 bp, synthetic construct
  source 1..40: mol_type = other DNA
ttggtgctcgaataatgtcaatctttcatttgctcgatgg

SEQ ID NO: 9477 - DNA, 40 bp, synthetic construct
  source 1..40: mol_type = other DNA
ggaccgattgcctgcctgcctgaagagccgacagccactc

SEQ ID NO: 9478 - DNA, 40 bp, synthetic construct
  source 1..40: mol_type = other DNA
tgtctccgcttcatgccattgaattgtgaagcttgcagta

SEQ ID NO: 9479 - DNA, 40 bp, synthetic construct
  source 1..40: mol_type = other DNA
cacccatcggaatttctgtgctcataatctgagattcgga

SEQ ID NO: 9480 - DNA, 40 bp, synthetic construct
  source 1..40: mol_type = other DNA
ctgggatcatcagaagacccgatgggtgcatagatccctg

SEQ ID NO: 9481 - DNA, 40 bp, synthetic construct
  source 1..40: mol_type = other DNA
tcctactatgtccttttcctcatttttttctcaggcctgc

SEQ ID NO: 9482 - DNA, 40 bp, synthetic construct
  source 1..40: mol_type = other DNA
ctttgtgtttccagatgatgtttcaggatgacatctcggc

SEQ ID NO: 9483 - DNA, 40 bp, synthetic construct
  source 1..40: mol_type = other DNA
agatccgctgctggtttgggatcatcattccacaccactg

SEQ ID NO: 9484 - DNA, 40 bp, synthetic construct
  source 1..40: mol_type = other DNA
ccgagagggtgggtgtgtcacacttcgggtccaggatgaa

SEQ ID NO: 9485 - DNA, 40 bp, synthetic construct
  source 1..40: mol_type = other DNA
ggtcagctaatgctctgagcgcccatttgaatagttcaag

SEQ ID NO: 9486 - DNA, 40 bp, synthetic construct
  source 1..40: mol_type = other DNA
tttccttatagtagccaccacagttgctgtttgtgttaga

SEQ ID NO: 9487 - DNA, 40 bp, synthetic construct
  source 1..40: mol_type = other DNA
catactccgtctgctcaggggctaggaaagacaatggtgg

SEQ ID NO: 9488 - DNA, 40 bp, synthetic construct
  source 1..40: mol_type = other DNA
ggctgcttccataagcacgtgggtcactctcaccgtgtgc

SEQ ID NO: 9489 - DNA, 40 bp, synthetic construct
  source 1..40: mol_type = other DNA
catcaaaggagatgacgtggtcggtaattgacataggagc

SEQ ID NO: 9490 - DNA, 40 bp, synthetic construct
  source 1..40: mol_type = other DNA
gatctgttcttgtgaatggacttgtaatctgcaaccactg

SEQ ID NO: 9491 - DNA, 40 bp, synthetic construct
  source 1..40: mol_type = other DNA
agtcaccaaaaggctttcgcctcaaacttgggctccataa

SEQ ID NO: 9492 - DNA, 40 bp, synthetic construct
  source 1..40: mol_type = other DNA
ccttgttgcaagtctgacatgtgggcgagctgagtaaagc

SEQ ID NO: 9493 - DNA, 40 bp, synthetic construct
  source 1..40: mol_type = other DNA
cattcatgctgctcacagcggaggccaaagttgttgatgc

SEQ ID NO: 9494 - DNA, 40 bp, synthetic construct
  source 1..40: mol_type = other DNA
gcatccgtggcagtgaaccacaaagaagagcttcacatag

SEQ ID NO: 9495 - DNA, 40 bp, synthetic construct
  source 1..40: mol_type = other DNA
cggaattttaggtggccatggcaagcacctggcatgatag

SEQ ID NO: 9496 - DNA, 40 bp, synthetic construct
  source 1..40: mol_type = other DNA
tgcttccaactctgcagacagcatcgatgtcaccatagag

SEQ ID NO: 9497 - DNA, 40 bp, synthetic construct
  source 1..40: mol_type = other DNA
tagtcagcattgtaagttggcttcccagcttttgtagcca

SEQ ID NO: 9498 - DNA, 40 bp, synthetic construct
  source 1..40: mol_type = other DNA
ctatccagtagtaagaacgatcctcctatcttccggattc

SEQ ID NO: 9499 - DNA, 40 bp, synthetic construct
  source 1..40: mol_type = other DNA
caccacacaaaacgtttcatatgtttgacgtaggaggtgc

SEQ ID NO: 9500 - DNA, 40 bp, synthetic construct
  source 1..40: mol_type = other DNA
gttgctacctcttgcctctttagcgaccggcacgctcgct

SEQ ID NO: 9501 - DNA, 40 bp, synthetic construct
  source 1..40: mol_type = other DNA
tgagtcaagctgctgaagtttgaacctgctccaggaattt

SEQ ID NO: 9502 - DNA, 40 bp, synthetic construct
  source 1..40: mol_type = other DNA
gcacgtactccatcgctgacctcgtccgtgagagttttct

SEQ ID NO: 9503 - DNA, 40 bp, synthetic construct
  source 1..40: mol_type = other DNA
tcctttagcaacagccgttcaaaaggtgccaggcatttta

SEQ ID NO: 9504 - DNA, 40 bp, synthetic construct
  source 1..40: mol_type = other DNA
ttgactcaatgtggcaggtgcagctcatcacctccagtag

SEQ ID NO: 9505 - DNA, 40 bp, synthetic construct
  source 1..40: mol_type = other DNA
atcaatgctcgggccaacgctaagtacacacggtttccgg

SEQ ID NO: 9506 - DNA, 40 bp, synthetic construct
  source 1..40: mol_type = other DNA
gccagcatatgccttcagttaacctacagggtgtttatgg

SEQ ID NO: 9507 - DNA, 40 bp, synthetic construct
  source 1..40: mol_type = other DNA
atgaaacttcctggcgcatctgtgagctttagtttcccaa

SEQ ID NO: 9508 - DNA, 40 bp, synthetic construct
  source 1..40: mol_type = other DNA
acatgccaacgaaaaggttgtttggatcagggattaacac

SEQ ID NO: 9509 - DNA, 40 bp, synthetic construct
  source 1..40: mol_type = other DNA
tgcgtgaccatctataaaagacaactttgtaacacccagg

SEQ ID NO: 9510 - DNA, 40 bp, synthetic construct
  source 1..40: mol_type = other DNA
tctcacaagttcacggagctctcaggtgaatcggctgtgt

SEQ ID NO: 9511 - DNA, 40 bp, synthetic construct
  source 1..40: mol_type = other DNA
gcgtagtagtcggcctcagggcacgcgggtgacctccttg

SEQ ID NO: 9512 - DNA, 40 bp, synthetic construct
  source 1..40: mol_type = other DNA
cgatcatgttggacagctgcgctgcacttgcaggagcgca

SEQ ID NO: 9513 - DNA, 40 bp, synthetic construct
  source 1..40: mol_type = other DNA
tatgaaatggtcttctctggcatgtctccaggaatccaac

SEQ ID NO: 9514 - DNA, 40 bp, synthetic construct
  source 1..40: mol_type = other DNA
cctgtatcgttcacggtcaggatagatgcagaagtactcc

SEQ ID NO: 9515 - DNA, 40 bp, synthetic construct
  source 1..40: mol_type = other DNA
ttccactttacctggatctaagcctccggattgttaacgt

SEQ ID NO: 9516 - DNA, 40 bp, synthetic construct
  source 1..40: mol_type = other DNA
atttacccaaaatccttcccgactttatcgcagctctcag

SEQ ID NO: 9517 - DNA, 40 bp, synthetic construct
  source 1..40: mol_type = other DNA
tggaaaccttcatggatgatcaatcacctttcggctttta

SEQ ID NO: 9518 - DNA, 40 bp, synthetic construct
  source 1..40: mol_type = other DNA
ggtcttattcatctgacaggaggaccgacacaccaatgat

SEQ ID NO: 9519 - DNA, 40 bp, synthetic construct
  source 1..40: mol_type = other DNA
gagcagctagaatgttgagattccagagcaaatgcagcaa

SEQ ID NO: 9520 - DNA, 40 bp, synthetic construct
  source 1..40: mol_type = other DNA
agacagccgctatgcacaccccacggcccatctgcgtcac

SEQ ID NO: 9521 - DNA, 40 bp, synthetic construct
  source 1..40: mol_type = other DNA
gatcctgcaatgatcttgtcagctgggcagttactacaag

SEQ ID NO: 9522 - DNA, 40 bp, synthetic construct
  source 1..40: mol_type = other DNA
ctgatcgttaaatgtcccaaggtcgacagatgccacgttt

SEQ ID NO: 9523 - DNA, 40 bp, synthetic construct
  source 1..40: mol_type = other DNA
gctcaatctgtcttcctcatatttaccctccgattggatt

SEQ ID NO: 9524 - DNA, 40 bp, synthetic construct
  source 1..40: mol_type = other DNA
aaatgtgacatctccatccaagcagtttcaatgcaccaaa

SEQ ID NO: 9525 - DNA, 40 bp, synthetic construct
  source 1..40: mol_type = other DNA
aaaacatgtctgagccaagggttcagctccgttttcacgg

SEQ ID NO: 9526 - DNA, 40 bp, synthetic construct
  source 1..40: mol_type = other DNA
cttcatgagatgatctcctttcctccagaaattcctgact

SEQ ID NO: 9527 - DNA, 40 bp, synthetic construct
  source 1..40: mol_type = other DNA
ccatgccagtactatacagacttcgtgaaacatctccgta

SEQ ID NO: 9528 - DNA, 40 bp, synthetic construct
  source 1..40: mol_type = other DNA
ctctgagcaaggcccacaggacaaacaaatgctttctccg

SEQ ID NO: 9529 - DNA, 40 bp, synthetic construct
  source 1..40: mol_type = other DNA
accgatcagggagagagagaaagataagctagtgactgtc

SEQ ID NO: 9530 - DNA, 40 bp, synthetic construct
  source 1..40: mol_type = other DNA
aaccagtccatagaagaggtcagtgtggctgtttggcaac

SEQ ID NO: 9531 - DNA, 40 bp, synthetic construct
  source 1..40: mol_type = other DNA
ctcatggagaagcatccgggtgagtatggaggagatgtgt

SEQ ID NO: 9532 - DNA, 40 bp, synthetic construct
  source 1..40: mol_type = other DNA
ggaatgagagaagcaggtggaaagctgaggtgtccatagg

SEQ ID NO: 9533 - DNA, 40 bp, synthetic construct
  source 1..40: mol_type = other DNA
tgactagtggtggcaggactgatgaaccgtggcatttcca

SEQ ID NO: 9534 - DNA, 40 bp, synthetic construct
  source 1..40: mol_type = other DNA
atccttccacgcatgacaccagcacattgtacaccagctt

SEQ ID NO: 9535 - DNA, 40 bp, synthetic construct
  source 1..40: mol_type = other DNA
gtcacttcgccctgagagactggatttccagctgtatggg

SEQ ID NO: 9536 - DNA, 40 bp, synthetic construct
  source 1..40: mol_type = other DNA
ccaggtggaaagaatgatgaagcagaaagagacttggtac

SEQ ID NO: 9537 - DNA, 40 bp, synthetic construct
  source 1..40: mol_type = other DNA
ttgctttgctgtgagggaacaccatccctagcctgtattg

SEQ ID NO: 9538 - DNA, 40 bp, synthetic construct
  source 1..40: mol_type = other DNA
ctctatgcagcagccaatgtttctgctgcagaagcacgtt

SEQ ID NO: 9539 - DNA, 40 bp, synthetic construct
  source 1..40: mol_type = other DNA
caaaacctcctggaatcccatgcagtgtaacctcaacgct

SEQ ID NO: 9540 - DNA, 40 bp, synthetic construct
  source 1..40: mol_type = other DNA
ccaagaggttcctccacactggcaagcatagctggcttct

SEQ ID NO: 9541 - DNA, 40 bp, synthetic construct
  source 1..40: mol_type = other DNA
gtgtgagcaccttgtggtccaccggtcactgcctcctttt

SEQ ID NO: 9542 - DNA, 40 bp, synthetic construct
  source 1..40: mol_type = other DNA
gggatgatggtctgcttcagcgatcatgttcctgtagtcg

SEQ ID NO: 9543 - DNA, 40 bp, synthetic construct
  source 1..40: mol_type = other DNA
cgcagagaggaatctaaagtacttataagtgcacgtctac

SEQ ID NO: 9544 - DNA, 40 bp, synthetic construct
  source 1..40: mol_type = other DNA
gggactcaagcaagtacaaaagaggaagagaaacagtcat

SEQ ID NO: 9545 - DNA, 40 bp, synthetic construct
  source 1..40: mol_type = other DNA
gcactagtagcctcatccaggctcgcactgcacatctagg

SEQ ID NO: 9546 - DNA, 40 bp, synthetic construct
  source 1..40: mol_type = other DNA
cacacgaccagaatagtgagtcacctcccaggatgtcaat

SEQ ID NO: 9547 - DNA, 40 bp, synthetic construct
  source 1..40: mol_type = other DNA
gcatttgtagaggaagttctaaggccttggttttagtgat

SEQ ID NO: 9548 - DNA, 40 bp, synthetic construct
  source 1..40: mol_type = other DNA
caggtaattgtcacggagacctccaccacttaaagaaggc

SEQ ID NO: 9549 - DNA, 40 bp, synthetic construct
  source 1..40: mol_type = other DNA
gtgtgaacaaggtctggacggcaactctaaacatgtgaga

SEQ ID NO: 9550 - DNA, 40 bp, synthetic construct
  source 1..40: mol_type = other DNA
attgggtccatcattttgtgtctagggttgttttgtgtgc

SEQ ID NO: 9551 - DNA, 40 bp, synthetic construct
  source 1..40: mol_type = other DNA
gcgtacagttctagagagagctaatgctgatgcaggtaca

SEQ ID NO: 9552 - DNA, 40 bp, synthetic construct
  source 1..40: mol_type = other DNA
tgttctggctctatactctcgtgtcttcaggattgtgact

SEQ ID NO: 9553 - DNA, 40 bp, synthetic construct
  source 1..40: mol_type = other DNA
ctcatctggtgagcctgagaaccttctttcacagcatccc

SEQ ID NO: 9554 - DNA, 40 bp, synthetic construct
  source 1..40: mol_type = other DNA
gtccacacacacaattgacttgtatccattcagcttgagg

SEQ ID NO: 9555 - DNA, 40 bp, synthetic construct
  source 1..40: mol_type = other DNA
tccaccggacagcactctaataagacgttcgggtgggatc

SEQ ID NO: 9556 - DNA, 40 bp, synthetic construct
  source 1..40: mol_type = other DNA
atgaaattcaactggtgggtaaatcatggccttaagcatg

SEQ ID NO: 9557 - DNA, 40 bp, synthetic construct
  source 1..40: mol_type = other DNA
tgttcaggtagcggtcaaaggagctgggtggcatgaacta

SEQ ID NO: 9558 - DNA, 40 bp, synthetic construct
  source 1..40: mol_type = other DNA
gccactttgcagaggccagatgatgttgaagagggcacct

SEQ ID NO: 9559 - DNA, 40 bp, synthetic construct
  source 1..40: mol_type = other DNA
agtcctaccacgagacatactgttcagttcccttttctac

SEQ ID NO: 9560 - DNA, 40 bp, synthetic construct
  source 1..40: mol_type = other DNA
ttccttcatggagtcatagtttttcttcacggaaacaggg

SEQ ID NO: 9561 - DNA, 40 bp, synthetic construct
  source 1..40: mol_type = other DNA
atcacagttttgcagaggaaagttgactttgtgcagggca

SEQ ID NO: 9562 - DNA, 40 bp, synthetic construct
  source 1..40: mol_type = other DNA
cgttatagttgtccaatctgattttccaccagggaggtgt

SEQ ID NO: 9563 - DNA, 40 bp, synthetic construct
  source 1..40: mol_type = other DNA
gttgttggcaaggcattggttcagggatgagacatttaca

SEQ ID NO: 9564 - DNA, 40 bp, synthetic construct
  source 1..40: mol_type = other DNA
tcactgctgctctgatctacggtggtgccagcacttgttt

SEQ ID NO: 9565 - DNA, 40 bp, synthetic construct
  source 1..40: mol_type = other DNA
tggaggtgcagtttttgaaggatgtggagatcgccactga

SEQ ID NO: 9566 - DNA, 40 bp, synthetic construct
  source 1..40: mol_type = other DNA
ccaaagctgtatttgccctcacttcttcacgcaggtggca

SEQ ID NO: 9567 - DNA, 40 bp, synthetic construct
  source 1..40: mol_type = other DNA
tattcgagggcttatcggtgatgcgggatacctcaagttg

SEQ ID NO: 9568 - DNA, 40 bp, synthetic construct
  source 1..40: mol_type = other DNA
actcctttcccgttcatgcaacatgtagaagtctcatcga

SEQ ID NO: 9569 - DNA, 40 bp, synthetic construct
  source 1..40: mol_type = other DNA
cactcgtgcagttctacgatgtaaacggctcagatcttag

SEQ ID NO: 9570 - DNA, 40 bp, synthetic construct
  source 1..40: mol_type = other DNA
gtaagcgatagtggttggctcagactaatccggaacattc

SEQ ID NO: 9571 - DNA, 40 bp, synthetic construct
  source 1..40: mol_type = other DNA
ggactatctatgagcacctatcccactcgagactaatctt

SEQ ID NO: 9572 - DNA, 40 bp, synthetic construct
  source 1..40: mol_type = other DNA
cgtcaatcccttttatatccaatccggacttgaatacacg

SEQ ID NO: 9573 - DNA, 40 bp, synthetic construct
  source 1..40: mol_type = other DNA
tgttcaaccctggccgtctcagcgaataacccaacgaccg

SEQ ID NO: 9574 - DNA, 40 bp, synthetic construct
  source 1..40: mol_type = other DNA
tcactcaatcgcgcggcatgttccagatgatgccatacgt

SEQ ID NO: 9575 - DNA, 40 bp, synthetic construct
  source 1..40: mol_type = other DNA
acctccgctttgctactacaatagggtaagcctattgcaa

SEQ ID NO: 9576 - DNA, 40 bp, synthetic construct
  source 1..40: mol_type = other DNA
cggatagtgtttgaccgcgtgggcgtgtcattcagcactt

SEQ ID NO: 9577 - DNA, 40 bp, synthetic construct
  source 1..40: mol_type = other DNA
acaaatagccttcttcatccatccactcgagacataacat

SEQ ID NO: 9578 - DNA, 40 bp, synthetic construct
  source 1..40: mol_type = other DNA
acagtgtcacctttcttgattcataggcatgtagataacc

SEQ ID NO: 9579 - DNA, 40 bp, synthetic construct
  source 1..40: mol_type = other DNA
ttcctcttcacacactcctcaatccacctcgtaccgctgt

SEQ ID NO: 9580 - DNA, 40 bp, synthetic construct
  source 1..40: mol_type = other DNA
gttgatgatgactgcggtggaggaggatgatgaccactag

SEQ ID NO: 9581 - DNA, 40 bp, synthetic construct
  source 1..40: mol_type = other DNA
ctagaactcaaaacactggcgaggtgcagagtgtgtgcta

SEQ ID NO: 9582 - DNA, 40 bp, synthetic construct
  source 1..40: mol_type = other DNA
aaagctgtcgtatacgaagtttctgttgcttgggactgta

SEQ ID NO: 9583 - DNA, 40 bp, synthetic construct
  source 1..40: mol_type = other DNA
cacagatggacaggctgcctggaactttcctctccttatg

SEQ ID NO: 9584 - DNA, 40 bp, synthetic construct
  source 1..40: mol_type = other DNA
gtgaaagagcattccacattggtacgctaatccagtcata

SEQ ID NO: 9585 - DNA, 40 bp, synthetic construct
  source 1..40: mol_type = other DNA
tagaacccaaggaagcagagaggcagcactcagcgccatg

SEQ ID NO: 9586 - DNA, 40 bp, synthetic construct
  source 1..40: mol_type = other DNA
cttggctcggtacttgttcatagtggaatagcatgctgca

SEQ ID NO: 9587 - DNA, 40 bp, synthetic construct
  source 1..40: mol_type = other DNA
gagaaccaatggcctagctcgctgatccttccttaagttt

SEQ ID NO: 9588 - DNA, 40 bp, synthetic construct
  source 1..40: mol_type = other DNA
acatgctgtgaacaaagtcattgtgagtgctcatcaccct

SEQ ID NO: 9589 - DNA, 40 bp, synthetic construct
  source 1..40: mol_type = other DNA
atcaggttgctgcacagcttatacctagaacggccagtcc

SEQ ID NO: 9590 - DNA, 40 bp, synthetic construct
  source 1..40: mol_type = other DNA
gtggccggctaggcagatggcttgagaagatggtgcccta

SEQ ID NO: 9591 - DNA, 40 bp, synthetic construct
  source 1..40: mol_type = other DNA
tttcatcgtgggtagcaagctaccagatacaggttgttga

SEQ ID NO: 9592 - DNA, 40 bp, synthetic construct
  source 1..40: mol_type = other DNA
gttactctcccggctccggatgcgcctttccctgcacgcg

SEQ ID NO: 9593 - DNA, 40 bp, synthetic construct
  source 1..40: mol_type = other DNA
ccagcaaggttctttctgtttgcaagtgaaacctccaacc

SEQ ID NO: 9594 - DNA, 40 bp, synthetic construct
  source 1..40: mol_type = other DNA
gatcgaggcaacgttttgggcccactgctaagattcgaaa

SEQ ID NO: 9595 - DNA, 40 bp, synthetic construct
  source 1..40: mol_type = other DNA
gtagcctgttggtttgcagaccaggcctggatacaagttg

SEQ ID NO: 9596 - DNA, 40 bp, synthetic construct
  source 1..40: mol_type = other DNA
ggcctcataaggttcatctaggagacatctctggtacaat

SEQ ID NO: 9597 - DNA, 40 bp, synthetic construct
  source 1..40: mol_type = other DNA
tatagaagtcccagtgggtgtcatatgccatgattgttcc

SEQ ID NO: 9598 - DNA, 40 bp, synthetic construct
  source 1..40: mol_type = other DNA
accttgccttctttgtctttggccagtgatgctgtagaaa

SEQ ID NO: 9599 - DNA, 40 bp, synthetic construct
  source 1..40: mol_type = other DNA
tcgaccggtgcaatcttcaagaaaaataggctgtcctttg

SEQ ID NO: 9600 - DNA, 40 bp, synthetic construct
  source 1..40: mol_type = other DNA
acaggcgtttcacggcaacgtgtccaaacagggtttattg

SEQ ID NO: 9601 - DNA, 40 bp, synthetic construct
  source 1..40: mol_type = other DNA
gcccagtgatttacagaagacagaaagggctcacggaaat

SEQ ID NO: 9602 - DNA, 40 bp, synthetic construct
  source 1..40: mol_type = other DNA
cacagtccgtgtcagggttacatggatgagggaaagtatg

SEQ ID NO: 9603 - DNA, 40 bp, synthetic construct
  source 1..40: mol_type = other DNA
gctgacatagctaagctaagcacctaaggcaatcggattg

SEQ ID NO: 9604 - DNA, 40 bp, synthetic construct
  source 1..40: mol_type = other DNA
aagagaacttgtgtgtgttgttggcgtgattttggcgata

SEQ ID NO: 9605 - DNA, 40 bp, synthetic construct
  source 1..40: mol_type = other DNA
tcgccacaaactgaatttgttaccaaaatgtgacacaggc

SEQ ID NO: 9606 - DNA, 40 bp, synthetic construct
  source 1..40: mol_type = other DNA
ccgttcaactgattccttcaccactggcttgacgttattt

SEQ ID NO: 9607 - DNA, 40 bp, synthetic construct
  source 1..40: mol_type = other DNA
gcgtgcaccctttaagagaatgcacacatttcatgctaca

SEQ ID NO: 9608 - DNA, 40 bp, synthetic construct
  source 1..40: mol_type = other DNA
atcaacagcctgaatagcaatctgatttcagatcgacctt

SEQ ID NO: 9609 - DNA, 40 bp, synthetic construct
  source 1..40: mol_type = other DNA
cagcactgtcaaatgtcaccgagttcattttgtacatggg

SEQ ID NO: 9610 - DNA, 40 bp, synthetic construct
  source 1..40: mol_type = other DNA
acgtagaagctgtagtcaccttctgtggcttcaaacaggt

SEQ ID NO: 9611 - DNA, 40 bp, synthetic construct
  source 1..40: mol_type = other DNA
gacttggtgggtattggtcaggcatcaaggtctgtgattt

SEQ ID NO: 9612 - DNA, 40 bp, synthetic construct
  source 1..40: mol_type = other DNA
ggccacaaagattgctatcaatacacttcatgccaacggt

SEQ ID NO: 9613 - DNA, 40 bp, synthetic construct
  source 1..40: mol_type = other DNA
taccaacacgtaggcttttaatctcccttgctgttggatt

SEQ ID NO: 9614 - DNA, 40 bp, synthetic construct
  source 1..40: mol_type = other DNA
gccaacaggaacaccacgccgcactatcaccataaggccg

SEQ ID NO: 9615 - DNA, 40 bp, synthetic construct
  source 1..40: mol_type = other DNA
ggtcagaaatttctgcctgggggagggaccaaagtaaaag

SEQ ID NO: 9616 - DNA, 40 bp, synthetic construct
  source 1..40: mol_type = other DNA
cttcgccttgcgtgaggtttgacccgcagatagtactggt

SEQ ID NO: 9617 - DNA, 40 bp, synthetic construct
  source 1..40: mol_type = other DNA
tgcctctcatgagaagtaatagtagcacattaacaaggag

SEQ ID NO: 9618 - DNA, 40 bp, synthetic construct
  source 1..40: mol_type = other DNA
gcgggtgatgttgacactgtagaaagatggtcttctcgtg

SEQ ID NO: 9619 - DNA, 40 bp, synthetic construct
  source 1..40: mol_type = other DNA
cgttacacaccaggtgccattccagttgtgctgattgtgt

SEQ ID NO: 9620 - DNA, 40 bp, synthetic construct
  source 1..40: mol_type = other DNA
gcgacttgttgagtccaagctgagggctggattctcagtg

SEQ ID NO: 9621 - DNA, 40 bp, synthetic construct
  source 1..40: mol_type = other DNA
cggctatcaaactgagcctctgtgtcctgttgcacgaacc

SEQ ID NO: 9622 - DNA, 40 bp, synthetic construct
  source 1..40: mol_type = other DNA
tggcaatacaaggcaattcgtgctgcagatattaagctga

SEQ ID NO: 9623 - DNA, 40 bp, synthetic construct
  source 1..40: mol_type = other DNA
gaacacataatctcggttggatggcctcctggacttgttt

SEQ ID NO: 9624 - DNA, 40 bp, synthetic construct
  source 1..40: mol_type = other DNA
aaaggttatgcaaggtcccataagccctcacgatgatggg

SEQ ID NO: 9625 - DNA, 40 bp, synthetic construct
  source 1..40: mol_type = other DNA
tgaagtaactctgtcagaggccacaccttcattcctagag

SEQ ID NO: 9626 - DNA, 40 bp, synthetic construct
  source 1..40: mol_type = other DNA
cctaagcctttgtttcatgcagctggaagccttgttggcc

SEQ ID NO: 9627 - DNA, 40 bp, synthetic construct
  source 1..40: mol_type = other DNA
gagtcagttgtattccatctctcatccaattctcgactcc

SEQ ID NO: 9628 - DNA, 40 bp, synthetic construct
  source 1..40: mol_type = other DNA
cttgcttgtcattttctctgctccatcagcatccatgttt

SEQ ID NO: 9629 - DNA, 40 bp, synthetic construct
  source 1..40: mol_type = other DNA
tcccacaggtgggtgcctcttgaggatgtcccggatgaac

SEQ ID NO: 9630 - DNA, 40 bp, synthetic construct
  source 1..40: mol_type = other DNA
ctaagaaagtcctgcgcagattaactctatagcctgagga

SEQ ID NO: 9631 - DNA, 40 bp, synthetic construct
  source 1..40: mol_type = other DNA
gcaggttatttcagtgtccttaggttctcactcgctcaga

SEQ ID NO: 9632 - DNA, 40 bp, synthetic construct
  source 1..40: mol_type = other DNA
gcctcaccttcctgagctgcacaactctgctccaatccgc

SEQ ID NO: 9633 - DNA, 40 bp, synthetic construct
  source 1..40: mol_type = other DNA
gcgcacattacacacctggtcagttgttctggcttgactc

SEQ ID NO: 9634 - DNA, 40 bp, synthetic construct
  source 1..40: mol_type = other DNA
gttacccattttgtgtccatatgtccacgccaactcagat

SEQ ID NO: 9635 - DNA, 40 bp, synthetic construct
  source 1..40: mol_type = other DNA
atgctcacactctctctagtaactgcacattgggtggttg

SEQ ID NO: 9636 - DNA, 40 bp, synthetic construct
  source 1..40: mol_type = other DNA
cgttgagttcggtcacagactacattggtgattatgtcgc

SEQ ID NO: 9637 - DNA, 40 bp, synthetic construct
  source 1..40: mol_type = other DNA
tggtatccgaattcctctgggagattgtcttagctgtttg

SEQ ID NO: 9638 - DNA, 40 bp, synthetic construct
  source 1..40: mol_type = other DNA
tgacagggcagactggtgaaatgcaactccttcaactacg

SEQ ID NO: 9639 - DNA, 40 bp, synthetic construct
  source 1..40: mol_type = other DNA
cttacgacccaccaccagacggatgcagtcacctcctaaa

SEQ ID NO: 9640 - DNA, 40 bp, synthetic construct
  source 1..40: mol_type = other DNA
cctgatcttcaaactcggcgatgcacgcaggagtaatacc

SEQ ID NO: 9641 - DNA, 40 bp, synthetic construct
  source 1..40: mol_type = other DNA
tggcttgactgtttttgcagacttccggttcgtctctacc

SEQ ID NO: 9642 - DNA, 40 bp, synthetic construct
  source 1..40: mol_type = other DNA
tgttctccatccttgggatcattctagctactgggtaagt

SEQ ID NO: 9643 - DNA, 40 bp, synthetic construct
  source 1..40: mol_type = other DNA
tcatcaagctcgctgcttccatgccggtacgacacttggc

SEQ ID NO: 9644 - DNA, 40 bp, synthetic construct
  source 1..40: mol_type = other DNA
ccaggtgtacaaattcctgccagatacatgtctatggccc

SEQ ID NO: 9645 - DNA, 40 bp, synthetic construct
  source 1..40: mol_type = other DNA
aatatcagccacaataagggacccataaccattgacagtt

SEQ ID NO: 9646 - DNA, 40 bp, synthetic construct
  source 1..40: mol_type = other DNA
accttattcaggccttggaggtagggttaggtcatcaaag

SEQ ID NO: 9647 - DNA, 40 bp, synthetic construct
  source 1..40: mol_type = other DNA
gactgctccagggtccgcacgcacttcaagtttggagttg

SEQ ID NO: 9648 - DNA, 40 bp, synthetic construct
  source 1..40: mol_type = other DNA
gacaggaggttggacgatagacccagttataggaaaagac

SEQ ID NO: 9649 - DNA, 40 bp, synthetic construct
  source 1..40: mol_type = other DNA
taggtttgctttctcaggctgttttgatcttgtccagacg

SEQ ID NO: 9650 - DNA, 40 bp, synthetic construct
  source 1..40: mol_type = other DNA
gtagtttttctaggtccctcgactttctggaagttgagat

SEQ ID NO: 9651 - DNA, 40 bp, synthetic construct
  source 1..40: mol_type = other DNA
ttgtcaactgcggttgctccaatagcgatgtgacatgtgc

SEQ ID NO: 9652 - DNA, 40 bp, synthetic construct
  source 1..40: mol_type = other DNA
acaggctcatcaataacagacatctccatgttttagccgt

SEQ ID NO: 9653 - DNA, 40 bp, synthetic construct
  source 1..40: mol_type = other DNA
tcaaggccgaatctgctctcggaagttgttgtaggcgttc

SEQ ID NO: 9654 - DNA, 40 bp, synthetic construct
  source 1..40: mol_type = other DNA
caggcttgtcatgctggcaggtggattcttcaccgacgcc

SEQ ID NO: 9655 - DNA, 40 bp, synthetic construct
  source 1..40: mol_type = other DNA
ttattcagtccagttcaggagcgcagtgggagaccacgtt

SEQ ID NO: 9656 - DNA, 40 bp, synthetic construct
  source 1..40: mol_type = other DNA
gctgggaattgagaatggaggtaggagtatcagagtggtg

SEQ ID NO: 9657 - DNA, 40 bp, synthetic construct
  source 1..40: mol_type = other DNA
ttctgcatgttcccaaactcccacatcgggctggttgatc

SEQ ID NO: 9658 - DNA, 40 bp, synthetic construct
  source 1..40: mol_type = other DNA
agttgttcttcgggtcgctccacgcagctgaagaatgtgc

SEQ ID NO: 9659 - DNA, 40 bp, synthetic construct
  source 1..40: mol_type = other DNA
gtcacagtgctgattgcacagcgccctggaagcggtcaat

SEQ ID NO: 9660 - DNA, 40 bp, synthetic construct
  source 1..40: mol_type = other DNA
tggctgttgtggtcagctcttccagtggacgcagtcgtag

SEQ ID NO: 9661 - DNA, 40 bp, synthetic construct
  source 1..40: mol_type = other DNA
ccgtcctgcgtgtgcgtgtttgtactggtactcgccatgg

SEQ ID NO: 9662 - DNA, 40 bp, synthetic construct
  source 1..40: mol_type = other DNA
agtggtgaagtcatccgttgccctcggcgatacccatgct

SEQ ID NO: 9663 - DNA, 40 bp, synthetic construct
  source 1..40: mol_type = other DNA
cgaggattgagttgcaggcatctgctcaggcagaaaagtc

SEQ ID NO: 9664 - DNA, 40 bp, synthetic construct
  source 1..40: mol_type = other DNA
cgatttggtcatgtttcgatatcagcccactctcgctgta

SEQ ID NO: 9665 - DNA, 40 bp, synthetic construct
  source 1..40: mol_type = other DNA
ctgattgggagtagagcagaggcgccctgaaatcccggac

SEQ ID NO: 9666 - DNA, 40 bp, synthetic construct
  source 1..40: mol_type = other DNA
gttccctggatcaagcacacctgcattcagtgcttcaacc

SEQ ID NO: 9667 - DNA, 40 bp, synthetic construct
  source 1..40: mol_type = other DNA
aattcgtattcagcgtgttcgaaagctgcagaactgaggt

SEQ ID NO: 9668 - DNA, 40 bp, synthetic construct
  source 1..40: mol_type = other DNA
cctcttcatgaacttctccttttccttcttgcaacaagct

SEQ ID NO: 9669 - DNA, 40 bp, synthetic construct
  source 1..40: mol_type = other DNA
tgcccttggaacagcagtgaattccaaatccctctgcgtg

SEQ ID NO: 9670 - DNA, 40 bp, synthetic construct
  source 1..40: mol_type = other DNA
ttaaatgatccatagacgcccgtggtcatagagtatgcaa

SEQ ID NO: 9671 - DNA, 40 bp, synthetic construct
  source 1..40: mol_type = other DNA
acatgttgacgtacatgttgggcaatattcccggtgttgt

SEQ ID NO: 9672 - DNA, 40 bp, synthetic construct
  source 1..40: mol_type = other DNA
caatacagtcctttgtttggctgtattcaatggcgccacc

SEQ ID NO: 9673 - DNA, 40 bp, synthetic construct
  source 1..40: mol_type = other DNA
ccggcttgatgctgccggtccttggagccaccgatcacac

SEQ ID NO: 9674 - DNA, 40 bp, synthetic construct
  source 1..40: mol_type = other DNA
caggatcagtgtatacctcatccacctcctctaatgtggg

SEQ ID NO: 9675 - DNA, 40 bp, synthetic construct
  source 1..40: mol_type = other DNA
tcatggaattccacgggagggtaaaccttgcctatcagga

SEQ ID NO: 9676 - DNA, 40 bp, synthetic construct
  source 1..40: mol_type = other DNA
cacgaatccagtctaggtagtggtcacggtcgcatgttgt

SEQ ID NO: 9677 - DNA, 40 bp, synthetic construct
  source 1..40: mol_type = other DNA
tcgttaggagcttttggctcacacgtgtctaacgagtgac

SEQ ID NO: 9678 - DNA, 40 bp, synthetic construct
  source 1..40: mol_type = other DNA
atgattttggagccaaagctgaagacaaaaattacctcgg

SEQ ID NO: 9679 - DNA, 40 bp, synthetic construct
  source 1..40: mol_type = other DNA
gtgcccttggtttttcttctacgactgattcttaattccc

SEQ ID NO: 9680 - DNA, 40 bp, synthetic construct
  source 1..40: mol_type = other DNA
gaggtcactcacattttaaggtagtcacagtgccagaagt

SEQ ID NO: 9681 - DNA, 40 bp, synthetic construct
  source 1..40: mol_type = other DNA
tgtgcgtagaaagtgtagtctacaggtctacaattctagc

SEQ ID NO: 9682 - DNA, 40 bp, synthetic construct
  source 1..40: mol_type = other DNA
gaactgacagctcaaggactaaacaaaggagcaactgtgg

SEQ ID NO: 9683 - DNA, 40 bp, synthetic construct
  source 1..40: mol_type = other DNA
ccttgctcttgaagaagacacagtttggatctccggaggc

SEQ ID NO: 9684 - DNA, 40 bp, synthetic construct
  source 1..40: mol_type = other DNA
aaggcatgattcccttccttggcaatctgtctgtatatag

SEQ ID NO: 9685 - DNA, 40 bp, synthetic construct
  source 1..40: mol_type = other DNA
gtttttccacatttgcaccacgtgtaaggttcacagatca

SEQ ID NO: 9686 - DNA, 40 bp, synthetic construct
  source 1..40: mol_type = other DNA
tgttggagacacagcctcggcatgaggaagacgcctccgg

SEQ ID NO: 9687 - DNA, 40 bp, synthetic construct
  source 1..40: mol_type = other DNA
tctggcttcctttacaagaacgaccctttgtactgtcaac

SEQ ID NO: 9688 - DNA, 40 bp, synthetic construct
  source 1..40: mol_type = other DNA
acccaatcacacacaggtggcacaccattgacagcatggg

SEQ ID NO: 9689 - DNA, 40 bp, synthetic construct
  source 1..40: mol_type = other DNA
agaccactcagtgtgggcagagctgtttctcaaagccagt

SEQ ID NO: 9690 - DNA, 40 bp, synthetic construct
  source 1..40: mol_type = other DNA
ccgtaagactgacactcgagatgccaggtgggctccgttt

SEQ ID NO: 9691 - DNA, 40 bp, synthetic construct
  source 1..40: mol_type = other DNA
taatgaatcctcctgacaagaggctttatgcgagtcgttt

SEQ ID NO: 9692 - DNA, 40 bp, synthetic construct
  source 1..40: mol_type = other DNA
ctatagcctatccacatgttcccaggagacctctgaacag

SEQ ID NO: 9693 - DNA, 40 bp, synthetic construct
  source 1..40: mol_type = other DNA
ggctcttggcatcgctgtccctccctttccacgatacgca

SEQ ID NO: 9694 - DNA, 40 bp, synthetic construct
  source 1..40: mol_type = other DNA
ttctctgttggacttgacatcagcatccaaggtaaaagaa

SEQ ID NO: 9695 - DNA, 40 bp, synthetic construct
  source 1..40: mol_type = other DNA
gcaagatcttaggtggatcagatttcaccacttaacaggg

SEQ ID NO: 9696 - DNA, 40 bp, synthetic construct
  source 1..40: mol_type = other DNA
ttggagagagggttctgggactgtgctatctagaaacacc

SEQ ID NO: 9697 - DNA, 40 bp, synthetic construct
  source 1..40: mol_type = other DNA
gcctacaatagtgacaagccctaaatgaccaatccagtga

SEQ ID NO: 9698 - DNA, 40 bp, synthetic construct
  source 1..40: mol_type = other DNA
gggcatcatttgagtcctgcaggaatctgtgacatctcca

SEQ ID NO: 9699 - DNA, 40 bp, synthetic construct
  source 1..40: mol_type = other DNA
cagaaagcccacaagaaaagcacacacctttcagactaag

SEQ ID NO: 9700 - DNA, 40 bp, synthetic construct
  source 1..40: mol_type = other DNA
ctgtggcctcaaggcttggtcaaaggcggtgtgtacttcg

SEQ ID NO: 9701 - DNA, 40 bp, synthetic construct
  source 1..40: mol_type = other DNA
ccgatggaaatgaaagctcctgggaaatgcataagagaag

SEQ ID NO: 9702 - DNA, 40 bp, synthetic construct
  source 1..40: mol_type = other DNA
agccgcaaagaaatactgaaactccatttgcaacaacgga

SEQ ID NO: 9703 - DNA, 40 bp, synthetic construct
  source 1..40: mol_type = other DNA
gccggtagctcgcgacaacgccgtgtgccaccacttctgc

SEQ ID NO: 9704 - DNA, 40 bp, synthetic construct
  source 1..40: mol_type = other DNA
tccttctggttcttgtgaatagtcagtctgagcgacatca

SEQ ID NO: 9705 - DNA, 40 bp, synthetic construct
  source 1..40: mol_type = other DNA
tgtacgcacacatatccacaaggcatgtgtcccagcgacg

SEQ ID NO: 9706 - DNA, 40 bp, synthetic construct
  source 1..40: mol_type = other DNA
aatggctggcattcattaagggtggcaggagcaatgatta

SEQ ID NO: 9707 - DNA, 40 bp, synthetic construct
  source 1..40: mol_type = other DNA
ctttccacaacagacgctggagccatttcactagcagcta

SEQ ID NO: 9708 - DNA, 40 bp, synthetic construct
  source 1..40: mol_type = other DNA
tgtgaagtctgtccatgtgccaggtcctatgagcagacgc

SEQ ID NO: 9709 - DNA, 40 bp, synthetic construct
  source 1..40: mol_type = other DNA
gttcttgggctgcttggctttcagggatcaccacattgtc

SEQ ID NO: 9710 - DNA, 40 bp, synthetic construct
  source 1..40: mol_type = other DNA
gagatagaatcacagcttgatccaaccaaaagtctgagcc

SEQ ID NO: 9711 - DNA, 40 bp, synthetic construct
  source 1..40: mol_type = other DNA
aggtgaagtcattgaagaagcagcgcgatgtcatagtcga

SEQ ID NO: 9712 - DNA, 40 bp, synthetic construct
  source 1..40: mol_type = other DNA
tcacactgtcgcagacccaggctgttgtctccgcagtcgt

SEQ ID NO: 9713 - DNA, 40 bp, synthetic construct
  source 1..40: mol_type = other DNA
taggccaggtgacacaatttgaaattctctcatggatggt

SEQ ID NO: 9714 - DNA, 40 bp, synthetic construct
  source 1..40: mol_type = other DNA
ctcccaaaaattggttggtttccaaagccaatacgaagac

SEQ ID NO: 9715 - DNA, 40 bp, synthetic construct
  source 1..40: mol_type = other DNA
agagctgtcatcttgagcttagcttctccatttccttaga

SEQ ID NO: 9716 - DNA, 40 bp, synthetic construct
  source 1..40: mol_type = other DNA
cgacgacttgagctcggccaccctcggactcgttcacgag

SEQ ID NO: 9717 - DNA, 40 bp, synthetic construct
  source 1..40: mol_type = other DNA
tgcagctgtcccagacaaaggctggcacggcacactggtt

SEQ ID NO: 9718 - DNA, 40 bp, synthetic construct
  source 1..40: mol_type = other DNA
ccctttcggtgttgatgaagaaatccagcatagtcatcgt

SEQ ID NO: 9719 - DNA, 40 bp, synthetic construct
  source 1..40: mol_type = other DNA
agctgggttgtaatggaatgtctctgtcatagtcatactg

SEQ ID NO: 9720 - DNA, 40 bp, synthetic construct
  source 1..40: mol_type = other DNA
ctctctgtgagagttcagggagggacggtgtccaatgtag

SEQ ID NO: 9721 - DNA, 40 bp, synthetic construct
  source 1..40: mol_type = other DNA
tgttctcccactaggtatctctgtcttccaatttatccac

SEQ ID NO: 9722 - DNA, 40 bp, synthetic construct
  source 1..40: mol_type = other DNA
tgcccttaacatcatcagctgcttgaagacagtggtacac

SEQ ID NO: 9723 - DNA, 40 bp, synthetic construct
  source 1..40: mol_type = other DNA
cagaaaacgatgtcgcagaaatgggagtgataaattcctc

SEQ ID NO: 9724 - DNA, 40 bp, synthetic construct
  source 1..40: mol_type = other DNA
tacatagaccaaactccacatcttagctgtccatcttgtt

SEQ ID NO: 9725 - DNA, 40 bp, synthetic construct
  source 1..40: mol_type = other DNA
agatggataactgctagccagctctagatacatatgcact

SEQ ID NO: 9726 - DNA, 40 bp, synthetic construct
  source 1..40: mol_type = other DNA
tagctagccgagacattttatctagaagatatctgtggtc

SEQ ID NO: 9727 - DNA, 40 bp, synthetic construct
  source 1..40: mol_type = other DNA
aggcaagtatgttcctttgcatatcgcaaaggctatctcc

SEQ ID NO: 9728 - DNA, 40 bp, synthetic construct
  source 1..40: mol_type = other DNA
ggcggaaatctgagagtgcaccgcaggtaatcacctgtgc

SEQ ID NO: 9729 - DNA, 40 bp, synthetic construct
  source 1..40: mol_type = other DNA
ccctgctgatgagatggcatcgagtaatagcgtggactac

SEQ ID NO: 9730 - DNA, 40 bp, synthetic construct
  source 1..40: mol_type = other DNA
cgttcctgtaaactgcagattctcattttagggaaggagc

SEQ ID NO: 9731 - DNA, 40 bp, synthetic construct
  source 1..40: mol_type = other DNA
agggagagaaaaagccctgtatcctgagagtcctcgccag

SEQ ID NO: 9732 - DNA, 40 bp, synthetic construct
  source 1..40: mol_type = other DNA
gcggcataacttacattcaaggtaatcctctgaagagact

SEQ ID NO: 9733 - DNA, 40 bp, synthetic construct
  source 1..40: mol_type = other DNA
caggagtaattgaatccctccccaggctttgttgctatat

SEQ ID NO: 9734 - DNA, 40 bp, synthetic construct
  source 1..40: mol_type = other DNA
acggactcatctgtgcccagtgcacaggacctcaatgagg

SEQ ID NO: 9735 - DNA, 40 bp, synthetic construct
  source 1..40: mol_type = other DNA
aacgtctcctcatcggtccctggtcacgactatgcgaatc

SEQ ID NO: 9736 - DNA, 40 bp, synthetic construct
  source 1..40: mol_type = other DNA
gtggtaaggatggtattgaagaagttgtggatagcttctg

SEQ ID NO: 9737 - DNA, 40 bp, synthetic construct
  source 1..40: mol_type = other DNA
aaaacaacctcctcaaggtgctggagtttttagcagagct

SEQ ID NO: 9738 - DNA, 40 bp, synthetic construct
  source 1..40: mol_type = other DNA
gttagaagggcaaagttgacagccacaaattgatctggtg

SEQ ID NO: 9739 - DNA, 40 bp, synthetic construct
  source 1..40: mol_type = other DNA
agaattcagggtctctcctctgcctgaccatcaaaaggtc

SEQ ID NO: 9740 - DNA, 40 bp, synthetic construct
  source 1..40: mol_type = other DNA
gctgttcctctgtatttgttcatccatgagggcattaccg

SEQ ID NO: 9741 - DNA, 40 bp, synthetic construct
  source 1..40: mol_type = other DNA
aatcaatagggctccagcatcaaggcgccatccctgttgg

SEQ ID NO: 9742 - DNA, 40 bp, synthetic construct
  source 1..40: mol_type = other DNA
ggaggaaaaacaggcgggagcaagacctgaaagcagtacg

SEQ ID NO: 9743 - DNA, 40 bp, synthetic construct
  source 1..40: mol_type = other DNA
tcttgctgagtccgatctcggtttcagccaaacggccggc

SEQ ID NO: 9744 - DNA, 40 bp, synthetic construct
  source 1..40: mol_type = other DNA
cgcctgttggagtcctgcacactgagtaggcagcattttt

SEQ ID NO: 9745 - DNA, 40 bp, synthetic construct
  source 1..40: mol_type = other DNA
gactcccacttaaaagaagttctaaacttgagttgcctga

SEQ ID NO: 9746 - DNA, 40 bp, synthetic construct
  source 1..40: mol_type = other DNA
gcaactttaaggaggcgcttgagcagttcacatctatatg

SEQ ID NO: 9747 - DNA, 40 bp, synthetic construct
  source 1..40: mol_type = other DNA
ctccaacccgcggactccaacatcatggattctccggatg

SEQ ID NO: 9748 - DNA, 40 bp, synthetic construct
  source 1..40: mol_type = other DNA
taagtcatctccgttaacgagaagattactgctgccaact

SEQ ID NO: 9749 - DNA, 40 bp, synthetic construct
  source 1..40: mol_type = other DNA
aggacaccgtcagccctaagtgcgatccacgtctgtgaca

SEQ ID NO: 9750 - DNA, 40 bp, synthetic construct
  source 1..40: mol_type = other DNA
aatttcccaacgaatgccctctttctagtttccggtcatc

SEQ ID NO: 9751 - DNA, 40 bp, synthetic construct
  source 1..40: mol_type = other DNA
ggccagcttggtagaaggagctctttggttcttctatccg

SEQ ID NO: 9752 - DNA, 40 bp, synthetic construct
  source 1..40: mol_type = other DNA
gtcgctgcagtgagagggtttgatgctcatcatcgctttg

SEQ ID NO: 9753 - DNA, 40 bp, synthetic construct
  source 1..40: mol_type = other DNA
gtcagtggcattttccagaacatcccttttgttcacactg

SEQ ID NO: 9754 - DNA, 40 bp, synthetic construct
  source 1..40: mol_type = other DNA
cgccgttgatcccggagacgaatcttcttcgcccgaatgt

SEQ ID NO: 9755 - DNA, 40 bp, synthetic construct
  source 1..40: mol_type = other DNA
gtctcaggactctgacactgttttcggttgttgctgatct

SEQ ID NO: 9756 - DNA, 40 bp, synthetic construct
  source 1..40: mol_type = other DNA
catccttgtcctgtgagtatcagtactgtttgacaaaccg

SEQ ID NO: 9757 - DNA, 40 bp, synthetic construct
  source 1..40: mol_type = other DNA
aacttctaggaccatgggcactgctttctttttagcaggt

SEQ ID NO: 9758 - DNA, 40 bp, synthetic construct
  source 1..40: mol_type = other DNA
tgcaccacacagaactgattcacattagagacttcaggaa

SEQ ID NO: 9759 - DNA, 40 bp, synthetic construct
  source 1..40: mol_type = other DNA
gagtctgctgggtcaaactgtcatcaggtaaaggtaaccg

SEQ ID NO: 9760 - DNA, 40 bp, synthetic construct
  source 1..40: mol_type = other DNA
accagccactgtgatggtcctgcaccatgtggaaacgctc

SEQ ID NO: 9761 - DNA, 40 bp, synthetic construct
  source 1..40: mol_type = other DNA
ctcagccaaatgtttgccttttcagttcctgtttcaaggt

SEQ ID NO: 9762 - DNA, 40 bp, synthetic construct
  source 1..40: mol_type = other DNA
cgctttgctctcaggtgctcttatattctcaacccgggcg

SEQ ID NO: 9763 - DNA, 40 bp, synthetic construct
  source 1..40: mol_type = other DNA
aaaaggtggaaccatccactaagaaagggaatgaccacgg

SEQ ID NO: 9764 - DNA, 40 bp, synthetic construct
  source 1..40: mol_type = other DNA
agtgccatccacggctacaggccacacagctgaggacgaa

SEQ ID NO: 9765 - DNA, 40 bp, synthetic construct
  source 1..40: mol_type = other DNA
ctttacatggtttgccacggcttacagtatagagggtggt

SEQ ID NO: 9766 - DNA, 40 bp, synthetic construct
  source 1..40: mol_type = other DNA
taaccaaatcccatcagatctgttctgatcaggtagagaa

SEQ ID NO: 9767 - DNA, 40 bp, synthetic construct
  source 1..40: mol_type = other DNA
ggagtcaaggtatcctactttcagcacagctgttagtgtt

SEQ ID NO: 9768 - DNA, 40 bp, synthetic construct
  source 1..40: mol_type = other DNA
tcgttctactgatgtgggaaatgctccctccttctcggag

SEQ ID NO: 9769 - DNA, 40 bp, synthetic construct
  source 1..40: mol_type = other DNA
aacaggaggatcagacagattcagaaatacaactgcttgc

SEQ ID NO: 9770 - DNA, 40 bp, synthetic construct
  source 1..40: mol_type = other DNA
attggagtagctaggtttgagtggcactgctttaattgct

SEQ ID NO: 9771 - DNA, 40 bp, synthetic construct
  source 1..40: mol_type = other DNA
tacacctcaggagcttttctagctagagagagttggcgtc

SEQ ID NO: 9772 - DNA, 40 bp, synthetic construct
  source 1..40: mol_type = other DNA
tctcgaagcgctcacgcccactcattcagctctcggaaca

SEQ ID NO: 9773 - DNA, 40 bp, synthetic construct
  source 1..40: mol_type = other DNA
attcaggttgacaggtgggacaaaggcagtgtagacttta

SEQ ID NO: 9774 - DNA, 40 bp, synthetic construct
  source 1..40: mol_type = other DNA
aaagtagtacagcccaggaatagactgtgatgtggtaggc

SEQ ID NO: 9775 - DNA, 40 bp, synthetic construct
  source 1..40: mol_type = other DNA
tgatcataggtgaagagcatccacattattttcctggtac

SEQ ID NO: 9776 - DNA, 40 bp, synthetic construct
  source 1..40: mol_type = other DNA
aagttcaagtctcgtggtctagggagtgttccaagagctg

SEQ ID NO: 9777 - DNA, 40 bp, synthetic construct
  source 1..40: mol_type = other DNA
tattcgagcggcgcgtccctgcctctgcaccgagtcatcg

SEQ ID NO: 9778 - DNA, 40 bp, synthetic construct
  source 1..40: mol_type = other DNA
tcaagcagcacggtgttggaaggacctcaaagtcattcta

SEQ ID NO: 9779 - DNA, 40 bp, synthetic construct
  source 1..40: mol_type = other DNA
tcgtgcacagagcgtagctcgagctgtttggttcttgact

SEQ ID NO: 9780 - DNA, 40 bp, synthetic construct
  source 1..40: mol_type = other DNA
attacggtagaatcccaggcgtgcccaaaggcacaaagca

SEQ ID NO: 9781 - DNA, 40 bp, synthetic construct
  source 1..40: mol_type = other DNA
ggaatcagcctcgtggtccactgagaagctggaaatgaga

SEQ ID NO: 9782 - DNA, 40 bp, synthetic construct
  source 1..40: mol_type = other DNA
tcgctgctccatcttgtgctgagccctccaaactgatctg

SEQ ID NO: 9783 - DNA, 40 bp, synthetic construct
  source 1..40: mol_type = other DNA
ccctctcggactttcttccgcattttctgcatggctttct

SEQ ID NO: 9784 - DNA, 40 bp, synthetic construct
  source 1..40: mol_type = other DNA
gcattagaatacctccaaacgataagcaggtctccaactg

SEQ ID NO: 9785 - DNA, 40 bp, synthetic construct
  source 1..40: mol_type = other DNA
tcaatgcaggctagaatagatcttatgcaagcatgcaagc

SEQ ID NO: 9786 - DNA, 40 bp, synthetic construct
  source 1..40: mol_type = other DNA
tgggaaaagcatgatcagtgtccgtggccgacatggagat

SEQ ID NO: 9787 - DNA, 40 bp, synthetic construct
  source 1..40: mol_type = other DNA
tcatcaccgtcttcttggtaccgtgtctcgatggtcttga

SEQ ID NO: 9788 - DNA, 40 bp, synthetic construct
  source 1..40: mol_type = other DNA
ccttaggcaacatcctcctggagacaagatctctgctatt

SEQ ID NO: 9789 - DNA, 40 bp, synthetic construct
  source 1..40: mol_type = other DNA
caggatttttgtcaagctgcgggctctgctcaatgtcttt

SEQ ID NO: 9790 - DNA, 40 bp, synthetic construct
  source 1..40: mol_type = other DNA
ggcttctaggtgccagtgaccttcctaggaatcgtgggca

SEQ ID NO: 9791 - DNA, 40 bp, synthetic construct
  source 1..40: mol_type = other DNA
gctcaaggacgtctgtgaagcactcacatccgtctcaagg

SEQ ID NO: 9792 - DNA, 40 bp, synthetic construct
  source 1..40: mol_type = other DNA
aaggctggattaacacgctgggtttatgaaatccaggatg

SEQ ID NO: 9793 - DNA, 40 bp, synthetic construct
  source 1..40: mol_type = other DNA
tagcaatctgtgctgagtttttgtgcattaaccagagctt

SEQ ID NO: 9794 - DNA, 40 bp, synthetic construct
  source 1..40: mol_type = other DNA
aggattctccaagccggcagagagcccactgtgttgatgc

SEQ ID NO: 9795 - DNA, 40 bp, synthetic construct
  source 1..40: mol_type = other DNA
gcgttgcgctggcacactggctgcagtgttgatgcattcg

SEQ ID NO: 9796 - DNA, 40 bp, synthetic construct
  source 1..40: mol_type = other DNA
cggatgctgcccacagcgttcatctagcaggtagttatag

SEQ ID NO: 9797 - DNA, 40 bp, synthetic construct
  source 1..40: mol_type = other DNA
ttgataattgacctgtacgccgccacggtggaagtagtct

SEQ ID NO: 9798 - DNA, 40 bp, synthetic construct
  source 1..40: mol_type = other DNA
catcctgctttcttgaaaagttggaggagtaatgatagtc

SEQ ID NO: 9799 - DNA, 40 bp, synthetic construct
  source 1..40: mol_type = other DNA
agcagtgacatgaaggtagcaaagcacagaaaacctcaag

SEQ ID NO: 9800 - DNA, 40 bp, synthetic construct
  source 1..40: mol_type = other DNA
ataggacagctcaaggacagcagtatcaaattacccttcc

SEQ ID NO: 9801 - DNA, 40 bp, synthetic construct
  source 1..40: mol_type = other DNA
gctccaaggtcaggaagtccgaagctgtaacagatgagat

SEQ ID NO: 9802 - DNA, 40 bp, synthetic construct
  source 1..40: mol_type = other DNA
gggtcatacacacagacatggattagacttgaacacgtgt

SEQ ID NO: 9803 - DNA, 40 bp, synthetic construct
  source 1..40: mol_type = other DNA
agtgcacgcagcaacacaggggctgtgtcgagctgtaggg

SEQ ID NO: 9804 - DNA, 40 bp, synthetic construct
  source 1..40: mol_type = other DNA
atcttctgcttcggaggcaacagcagtcttccctgatttt

SEQ ID NO: 9805 - DNA, 40 bp, synthetic construct
  source 1..40: mol_type = other DNA
aatgtcaacatgcccaactgaaagtacctccattcgggta

SEQ ID NO: 9806 - DNA, 40 bp, synthetic construct
  source 1..40: mol_type = other DNA
atttcacaaataccgcaggtattcagagacttgtcatggc

SEQ ID NO: 9807 - DNA, 40 bp, synthetic construct
  source 1..40: mol_type = other DNA
ccaccaatatatgctgtgaagatgcactatggacaagaat

SEQ ID NO: 9808 - DNA, 40 bp, synthetic construct
  source 1..40: mol_type = other DNA
gggcagttacattctggtgctggcacttgggtagctttca

SEQ ID NO: 9809 - DNA, 40 bp, synthetic construct
  source 1..40: mol_type = other DNA
gagagtcatgaggactgtggtttggcatgagtgtgcaaca

SEQ ID NO: 9810 - DNA, 40 bp, synthetic construct
  source 1..40: mol_type = other DNA
gtaaaagggaaggccttcacccttctgctgattcttgttt

SEQ ID NO: 9811 - DNA, 40 bp, synthetic construct
  source 1..40: mol_type = other DNA
gaagaaattgcttgcttccattacttttccaaggacggtt

SEQ ID NO: 9812 - DNA, 40 bp, synthetic construct
  source 1..40: mol_type = other DNA
gcaccagccacactgaacaagatcgcacacatttgtcgtg

SEQ ID NO: 9813 - DNA, 40 bp, synthetic construct
  source 1..40: mol_type = other DNA
ggtttgtgggccgatgggctttactgtcacacgcttttgg

SEQ ID NO: 9814 - DNA, 40 bp, synthetic construct
  source 1..40: mol_type = other DNA
tccaggaaagtcatgtgctagcatcaactttgtggccaat

SEQ ID NO: 9815 - DNA, 40 bp, synthetic construct
  source 1..40: mol_type = other DNA
tgggctgctattgaaaccacgcaccaaaacaaacttttgc

SEQ ID NO: 9816 - DNA, 40 bp, synthetic construct
  source 1..40: mol_type = other DNA
ctgagagactctttctccatacatgtcttcacattcacct

SEQ ID NO: 9817 - DNA, 40 bp, synthetic construct
  source 1..40: mol_type = other DNA
ccgattcggagtacagttccaatctgatcgaaagtctcgt

SEQ ID NO: 9818 - DNA, 40 bp, synthetic construct
  source 1..40: mol_type = other DNA
gcccatttttccctctgcccccggcccaacttgctgaagt

SEQ ID NO: 9819 - DNA, 40 bp, synthetic construct
  source 1..40: mol_type = other DNA
ttaagtcactaatcctctccctcttctgcaagatttgtcg

SEQ ID NO: 9820 - DNA, 40 bp, synthetic construct
  source 1..40: mol_type = other DNA
agacaacgttctggaaaaggaaagggaggatgcactttgg

SEQ ID NO: 9821 - DNA, 40 bp, synthetic construct
  source 1..40: mol_type = other DNA
attgatgtggacatctctgagggtcgtggtagtctccata

SEQ ID NO: 9822 - DNA, 40 bp, synthetic construct
  source 1..40: mol_type = other DNA
tcgcgctctcggtcaccctgggctgatttccatgccacgc

SEQ ID NO: 9823 - DNA, 40 bp, synthetic construct
  source 1..40: mol_type = other DNA
gggtactgccagctcacttcagctctcttcttcagacatg

SEQ ID NO: 9824 - DNA, 40 bp, synthetic construct
  source 1..40: mol_type = other DNA
cccgtgtctagcccagtgagtgtgggtgcaaaagtattct

SEQ ID NO: 9825 - DNA, 40 bp, synthetic construct
  source 1..40: mol_type = other DNA
cttgcttcatctggacaaatggaagtttagggtatatggc

SEQ ID NO: 9826 - DNA, 40 bp, synthetic construct
  source 1..40: mol_type = other DNA
tcaactgttgcccgcattgcaaggctgattttcctggtgt

SEQ ID NO: 9827 - DNA, 40 bp, synthetic construct
  source 1..40: mol_type = other DNA
atagatccggacttcaggaacatttatatgtccctgagtc

SEQ ID NO: 9828 - DNA, 40 bp, synthetic construct
  source 1..40: mol_type = other DNA
atggtgctagtcctatcccaagaggtgacagggacttaaa

SEQ ID NO: 9829 - DNA, 40 bp, synthetic construct
  source 1..40: mol_type = other DNA
cgccggagaaacccgagctcccagtccaggagcctaatga

SEQ ID NO: 9830 - DNA, 40 bp, synthetic construct
  source 1..40: mol_type = other DNA
cattgcacacagaggccaccctgcacgcccttctcatagg

SEQ ID NO: 9831 - DNA, 40 bp, synthetic construct
  source 1..40: mol_type = other DNA
atcaaaaagagcgagtgggagcagtagttattatgtggcc

SEQ ID NO: 9832 - DNA, 40 bp, synthetic construct
  source 1..40: mol_type = other DNA
taccagttcttacaagtgctgtccacagatggacttttta

SEQ ID NO: 9833 - DNA, 40 bp, synthetic construct
  source 1..40: mol_type = other DNA
actttaagaggtttgccagggctcttgacagtggtacttc

SEQ ID NO: 9834 - DNA, 40 bp, synthetic construct
  source 1..40: mol_type = other DNA
ggaacgtggagaggaggaggttcccagacatttactcaag

SEQ ID NO: 9835 - DNA, 40 bp, synthetic construct
  source 1..40: mol_type = other DNA
ctagggagaacagtttcaatgaaaaagggaaaatggcctg

SEQ ID NO: 9836 - DNA, 40 bp, synthetic construct
  source 1..40: mol_type = other DNA
gctctgggatttctttgctgctgctgtttgttttctcgtt

SEQ ID NO: 9837 - DNA, 40 bp, synthetic construct
  source 1..40: mol_type = other DNA
gataagcagccagaagccaggtggagaacgggtgtccaga

SEQ ID NO: 9838 - DNA, 40 bp, synthetic construct
  source 1..40: mol_type = other DNA
aataccggacacaggttcccggcagaaagtcgcagtatcg

SEQ ID NO: 9839 - DNA, 40 bp, synthetic construct
  source 1..40: mol_type = other DNA
gagacaacacacaaactaagcacatgagcgacaaactcaa

SEQ ID NO: 9840 - DNA, 40 bp, synthetic construct
  source 1..40: mol_type = other DNA
taccaagggaatgttggactccagcagcagaaagtccagc

SEQ ID NO: 9841 - DNA, 40 bp, synthetic construct
  source 1..40: mol_type = other DNA
tacaggttgtgttccatgggtccttcttcacagtcaaatg

SEQ ID NO: 9842 - DNA, 40 bp, synthetic construct
  source 1..40: mol_type = other DNA
gtgaatatgagacaagcttcggcaggtgaatgtctcggga

SEQ ID NO: 9843 - DNA, 40 bp, synthetic construct
  source 1..40: mol_type = other DNA
tatcagtctagttctgtcctaaattgttctaggtcactgc

SEQ ID NO: 9844 - DNA, 40 bp, synthetic construct
  source 1..40: mol_type = other DNA
cgtggctgatctcaccaatgctccatgttggacattacct

SEQ ID NO: 9845 - DNA, 40 bp, synthetic construct
  source 1..40: mol_type = other DNA
tatcacactgtaagtggtcctcctaatgtatagtaggcct

SEQ ID NO: 9846 - DNA, 40 bp, synthetic construct
  source 1..40: mol_type = other DNA
tggtcgccatcttgtaaacaggttagtcgtttgactttgg

SEQ ID NO: 9847 - DNA, 40 bp, synthetic construct
  source 1..40: mol_type = other DNA
aactagtgtgagttctgggagaaggttgtagttaagtacc

SEQ ID NO: 9848 - DNA, 40 bp, synthetic construct
  source 1..40: mol_type = other DNA
cacgacacaatcctctgtctgtagaatctgttctcattgg

SEQ ID NO: 9849 - DNA, 40 bp, synthetic construct
  source 1..40: mol_type = other DNA
aaggcggataagtagaggactgccctcgtccttgctagtg

SEQ ID NO: 9850 - DNA, 40 bp, synthetic construct
  source 1..40: mol_type = other DNA
agatctgaggcctttaagaagggagccggtggcataattt

SEQ ID NO: 9851 - DNA, 40 bp, synthetic construct
  source 1..40: mol_type = other DNA
tccatcttcataggcagcaacctgcgtcacactgctcaaa

SEQ ID NO: 9852 - DNA, 40 bp, synthetic construct
  source 1..40: mol_type = other DNA
gggagaacggaatccataagtacacatcgtaagtttcctg

SEQ ID NO: 9853 - DNA, 40 bp, synthetic construct
  source 1..40: mol_type = other DNA
caggtcttggtattcacgaaagggccatcttaacattgag

SEQ ID NO: 9854 - DNA, 40 bp, synthetic construct
  source 1..40: mol_type = other DNA
tggttagctggtccacctgcctcgacgcgggctttgtcgt

SEQ ID NO: 9855 - DNA, 40 bp, synthetic construct
  source 1..40: mol_type = other DNA
cacgttaaatacatcctggagtcatctggatgaccaaggg

SEQ ID NO: 9856 - DNA, 40 bp, synthetic construct
  source 1..40: mol_type = other DNA
ccaggacccatatttcttggacactttgtctctgtcttct

SEQ ID NO: 9857 - DNA, 40 bp, synthetic construct
  source 1..40: mol_type = other DNA
tctatgctgatacaagccagtagttactgccacatatctg

SEQ ID NO: 9858 - DNA, 40 bp, synthetic construct
  source 1..40: mol_type = other DNA
tgtagttgaaggttgcctttcatctgacagccttgtgccc

SEQ ID NO: 9859 - DNA, 40 bp, synthetic construct
  source 1..40: mol_type = other DNA
ctagcctttctctactgaactgcagctctttgtagaggac

SEQ ID NO: 9860 - DNA, 40 bp, synthetic construct
  source 1..40: mol_type = other DNA
caaagcccaagagttcttggggcaagggcgacgaagccac

SEQ ID NO: 9861 - DNA, 40 bp, synthetic construct
  source 1..40: mol_type = other DNA
ggtttatgaggcttgtcccttagtgcactctctgactcta

SEQ ID NO: 9862 - DNA, 40 bp, synthetic construct
  source 1..40: mol_type = other DNA
gcccttcaaggagcgggtggtgctgtgtggtagaatctgg

SEQ ID NO: 9863 - DNA, 40 bp, synthetic construct
  source 1..40: mol_type = other DNA
gatgtggacagcatgttgtgttctgataaaccgagaacga

SEQ ID NO: 9864 - DNA, 40 bp, synthetic construct
  source 1..40: mol_type = other DNA
acataggctaatgtgcccacattacttagatgctgcatgc

SEQ ID NO: 9865 - DNA, 40 bp, synthetic construct
  source 1..40: mol_type = other DNA
ctgagcttgctcgctcgggacccagtggatcgggtgtaaa

SEQ ID NO: 9866 - DNA, 40 bp, synthetic construct
  source 1..40: mol_type = other DNA
tttggaagaagactaagagggaagcgtttggcaatgtgct

SEQ ID NO: 9867 - DNA, 40 bp, synthetic construct
  source 1..40: mol_type = other DNA
agttgcgtgcctggagcagggatggccttgttgcgctcaa

SEQ ID NO: 9868 - DNA, 40 bp, synthetic construct
  source 1..40: mol_type = other DNA
gctctagttctggtctgagcgggctgacaaaaggttaagg

SEQ ID NO: 9869 - DNA, 40 bp, synthetic construct
  source 1..40: mol_type = other DNA
agcggaaatcttcatcgtccttcggagaagttgcagacgc

SEQ ID NO: 9870 - DNA, 40 bp, synthetic construct
  source 1..40: mol_type = other DNA
ttacggtggcgcgcagcgaggcatctcggagcgctagggt

SEQ ID NO: 9871 - DNA, 40 bp, synthetic construct
  source 1..40: mol_type = other DNA
agccagatgtgtccaaatcccctggcaagaaacgctgtca

SEQ ID NO: 9872 - DNA, 40 bp, synthetic construct
  source 1..40: mol_type = other DNA
cccaagctccattgtaaaaagctactcttgccaacagtgc

SEQ ID NO: 9873 - DNA, 40 bp, synthetic construct
  source 1..40: mol_type = other DNA
ggctcatgagcttcccggaaggcccacacatacagcttgg

SEQ ID NO: 9874 - DNA, 40 bp, synthetic construct
  source 1..40: mol_type = other DNA
gactacaaacaggtatgagggccaggttgttggtgtgctt

SEQ ID NO: 9875 - DNA, 40 bp, synthetic construct
  source 1..40: mol_type = other DNA
ccaaagaggtagaaacgaaacttgaatctcccgagttaat

SEQ ID NO: 9876 - DNA, 40 bp, synthetic construct
  source 1..40: mol_type = other DNA
taggcctccgccatcttatcctttcatcccaatctcactg

SEQ ID NO: 9877 - DNA, 40 bp, synthetic construct
  source 1..40: mol_type = other DNA
tgtctcataatctgggcgtcgttgtaaatgcttcatcctg

SEQ ID NO: 9878 - DNA, 40 bp, synthetic construct
  source 1..40: mol_type = other DNA
tgctcagccacaattcttgcactgagtagactatgtgcct

SEQ ID NO: 9879 - DNA, 40 bp, synthetic construct
  source 1..40: mol_type = other DNA
tgaatggcttggaggatgaattgcttctggaaaggaaact

SEQ ID NO: 9880 - DNA, 40 bp, synthetic construct
  source 1..40: mol_type = other DNA
tcccggatgctcacgaagcatgacggcagcgctgccgaaa

SEQ ID NO: 9881 - DNA, 40 bp, synthetic construct
  source 1..40: mol_type = other DNA
gtccttcacgaggaatgttcgcctttctatgctggtcaca

SEQ ID NO: 9882 - DNA, 40 bp, synthetic construct
  source 1..40: mol_type = other DNA
taaggaggaggatacataactgctcttctcattgtctagg

SEQ ID NO: 9883 - DNA, 40 bp, synthetic construct
  source 1..40: mol_type = other DNA
cctcatttgaccaaatccctgatattgctttgagggaatc

SEQ ID NO: 9884 - DNA, 40 bp, synthetic construct
  source 1..40: mol_type = other DNA
aaatagcacccacactgaaaatgctattttccaacttgcc

SEQ ID NO: 9885 - DNA, 40 bp, synthetic construct
  source 1..40: mol_type = other DNA
gggcaagtgtccaccagggcacttttactcacaggatggt

SEQ ID NO: 9886 - DNA, 40 bp, synthetic construct
  source 1..40: mol_type = other DNA
agacaataagctcagttctgacactgttaaacaggaggaa

SEQ ID NO: 9887 - DNA, 40 bp, synthetic construct
  source 1..40: mol_type = other DNA
ggacttcttatacctacttccacagcatccctatgagata

SEQ ID NO: 9888 - DNA, 40 bp, synthetic construct
  source 1..40: mol_type = other DNA
tgatgtatagggtttagtggtcacttaggataggagaaga

SEQ ID NO: 9889 - DNA, 40 bp, synthetic construct
  source 1..40: mol_type = other DNA
agcctagaaaagctcatcttgcttcctgggagaaaattgt

SEQ ID NO: 9890 - DNA, 40 bp, synthetic construct
  source 1..40: mol_type = other DNA
atcaccacttctctgggcagggtgagctaaggccaagcta

SEQ ID NO: 9891 - DNA, 40 bp, synthetic construct
  source 1..40: mol_type = other DNA
accaaagtggaaaggatcttgatgagtcccgaaagcagca

SEQ ID NO: 9892 - DNA, 40 bp, synthetic construct
  source 1..40: mol_type = other DNA
gactggagtcaacaagtagccctaaaagggttgtgatagg

SEQ ID NO: 9893 - DNA, 40 bp, synthetic construct
  source 1..40: mol_type = other DNA
taactgaggagccaattcaacccagcaggcatttttgtag

SEQ ID NO: 9894 - DNA, 40 bp, synthetic construct
  source 1..40: mol_type = other DNA
tgcaaatgaccatccagtgggcagagcacatttacggaga

SEQ ID NO: 9895 - DNA, 40 bp, synthetic construct
  source 1..40: mol_type = other DNA
ttagacgttctagagcctggggtttcggttctccactgtg

SEQ ID NO: 9896 - DNA, 40 bp, synthetic construct
  source 1..40: mol_type = other DNA
tggaacagaaggtgacttggttgactcgaagcttcccgat

SEQ ID NO: 9897 - DNA, 40 bp, synthetic construct
  source 1..40: mol_type = other DNA
gctgtagcgaccatttttctgcggcctccgtccgagagat

SEQ ID NO: 9898 - DNA, 40 bp, synthetic construct
  source 1..40: mol_type = other DNA
gctgtcggtgatccagggacgtagcagggattctgtctgt

SEQ ID NO: 9899 - DNA, 40 bp, synthetic construct
  source 1..40: mol_type = other DNA
atcgtttcaccttctctggtcacgatattttagctcgatg

SEQ ID NO: 9900 - DNA, 40 bp, synthetic construct
  source 1..40: mol_type = other DNA
atgcctagcccaatgaaaagggcacctgacacagaagaag

SEQ ID NO: 9901 - DNA, 40 bp, synthetic construct
  source 1..40: mol_type = other DNA
aaactagagagcaacactcacggtgtgattaagcctctgg

SEQ ID NO: 9902 - DNA, 40 bp, synthetic construct
  source 1..40: mol_type = other DNA
accaagcccgcgaccaatggtgcacaccacgaggcagatc

SEQ ID NO: 9903 - DNA, 40 bp, synthetic construct
  source 1..40: mol_type = other DNA
gagataaggtcgcgctggtctgggcagttgctcattgttg

SEQ ID NO: 9904 - DNA, 40 bp, synthetic construct
  source 1..40: mol_type = other DNA
cgttgttgctgctattgtgcgcgccaccaggtgacgttgg

SEQ ID NO: 9905 - DNA, 40 bp, synthetic construct
  source 1..40: mol_type = other DNA
tggatggtgatgttccctgcgaaattgaggtatggacact

SEQ ID NO: 9906 - DNA, 40 bp, synthetic construct
  source 1..40: mol_type = other DNA
ccttgcttctgcggacactgaccttcagatcttttcagcc

SEQ ID NO: 9907 - DNA, 40 bp, synthetic construct
  source 1..40: mol_type = other DNA
gcttcttcttcttccatttctttataagagttgcgaggcc

SEQ ID NO: 9908 - DNA, 40 bp, synthetic construct
  source 1..40: mol_type = other DNA
tagtccctgttacagcagcaactcatccgtgtgtctgtgc

SEQ ID NO: 9909 - DNA, 40 bp, synthetic construct
  source 1..40: mol_type = other DNA
gtttgaagtaatgtagtggccctcaaaaggaaggatctca

SEQ ID NO: 9910 - DNA, 40 bp, synthetic construct
  source 1..40: mol_type = other DNA
ccctttgtaaaacgggcggggtctctgggctttagcctcc

SEQ ID NO: 9911 - DNA, 40 bp, synthetic construct
  source 1..40: mol_type = other DNA
ttctcactgaacttgtgcaacccattataaagacagcaga

SEQ ID NO: 9912 - DNA, 40 bp, synthetic construct
  source 1..40: mol_type = other DNA
ctccaaatgagacttgggatcctagttagtgatagcattc

SEQ ID NO: 9913 - DNA, 40 bp, synthetic construct
  source 1..40: mol_type = other DNA
tttaatcatctgtgggccttttgtcacataaatggctggg

SEQ ID NO: 9914 - DNA, 40 bp, synthetic construct
  source 1..40: mol_type = other DNA
ggctgagcacacgatctgggaagttaacatcaacgctgct

SEQ ID NO: 9915 - DNA, 40 bp, synthetic construct
  source 1..40: mol_type = other DNA
gcccgtgcagatggaatcatacttgatttccactggaggt

SEQ ID NO: 9916 - DNA, 40 bp, synthetic construct
  source 1..40: mol_type = other DNA
ctaaaacatagccatgtgagacaacctttagcatcactgg

SEQ ID NO: 9917 - DNA, 40 bp, synthetic construct
  source 1..40: mol_type = other DNA
aggtaaggatgctccttttcttgtgtccctgtgcttttgg

SEQ ID NO: 9918 - DNA, 40 bp, synthetic construct
  source 1..40: mol_type = other DNA
ttttattctggttggctcaggagcagtggagtattggtta

SEQ ID NO: 9919 - DNA, 40 bp, synthetic construct
  source 1..40: mol_type = other DNA
gatgttgcatttcgtcacacgatgtcatcttgctgcacgt

SEQ ID NO: 9920 - DNA, 40 bp, synthetic construct
  source 1..40: mol_type = other DNA
tggaaatccctggtcctgtcgggactcatggaaaacatca

SEQ ID NO: 9921 - DNA, 40 bp, synthetic construct
  source 1..40: mol_type = other DNA
tcgccattataatagcgggctggtctgtggcacggttctc

SEQ ID NO: 9922 - DNA, 40 bp, synthetic construct
  source 1..40: mol_type = other DNA
gaatccgtgggagatggagtcaatctgatgggatctagga

SEQ ID NO: 9923 - DNA, 40 bp, synthetic construct
  source 1..40: mol_type = other DNA
gcatcgctccgctaggtgtcccgcatctgcgcctggttgg

SEQ ID NO: 9924 - DNA, 40 bp, synthetic construct
  source 1..40: mol_type = other DNA
tccatacctagcaggctgtctggcgtctcggcccgagaac

SEQ ID NO: 9925 - DNA, 40 bp, synthetic construct
  source 1..40: mol_type = other DNA
ttggttttcctttctgtgctgttggagattcatgagaacc

SEQ ID NO: 9926 - DNA, 40 bp, synthetic construct
  source 1..40: mol_type = other DNA
cgaatggcctggcactggatgctgggtcaggtaagcttca

SEQ ID NO: 9927 - DNA, 40 bp, synthetic construct
  source 1..40: mol_type = other DNA
gctgatggtagctgtagacttcaactccaggtttaaggcc

SEQ ID NO: 9928 - DNA, 40 bp, synthetic construct
  source 1..40: mol_type = other DNA
cattggtccggtcttctcctggagcaaggttgatttcttt

SEQ ID NO: 9929 - DNA, 40 bp, synthetic construct
  source 1..40: mol_type = other DNA
gatatgagtcagaatggcttagagaccctgttaaataggg

SEQ ID NO: 9930 - DNA, 40 bp, synthetic construct
  source 1..40: mol_type = other DNA
ccacagtcaaggaaaccagctccggctcccggcgtttctc

SEQ ID NO: 9931 - DNA, 40 bp, synthetic construct
  source 1..40: mol_type = other DNA
ggctcagacgagagaagacctgccaggtcgtagtactcag

SEQ ID NO: 9932 - DNA, 40 bp, synthetic construct
  source 1..40: mol_type = other DNA
gagttggagatgggaaagtggttctcttgggcttacttcc

SEQ ID NO: 9933 - DNA, 40 bp, synthetic construct
  source 1..40: mol_type = other DNA
ccttttgcatgttcaatccttccagacaaatatgcacacg

SEQ ID NO: 9934 - DNA, 40 bp, synthetic construct
  source 1..40: mol_type = other DNA
cccaagaatgacctgggacctccctggttattgagtgagc

SEQ ID NO: 9935 - DNA, 40 bp, synthetic construct
  source 1..40: mol_type = other DNA
ataagataagccatgtaggggagacttctgatcccagatc

SEQ ID NO: 9936 - DNA, 40 bp, synthetic construct
  source 1..40: mol_type = other DNA
ggcgcttcattgttctctttgtctcatgcctgctgttaga

SEQ ID NO: 9937 - DNA, 40 bp, synthetic construct
  source 1..40: mol_type = other DNA
gaaggtggtaccattactgtagcagaagttacacctagtt

SEQ ID NO: 9938 - DNA, 40 bp, synthetic construct
  source 1..40: mol_type = other DNA
ggttgcttttgatccaagtcatttgtatgaggcgggacaa

SEQ ID NO: 9939 - DNA, 40 bp, synthetic construct
  source 1..40: mol_type = other DNA
ctgcatttgccaatcctgagtgagcgaattccctctgcta

SEQ ID NO: 9940 - DNA, 40 bp, synthetic construct
  source 1..40: mol_type = other DNA
cccagttttccctagtttatgttatgctttcacctcagca

SEQ ID NO: 9941 - DNA, 40 bp, synthetic construct
  source 1..40: mol_type = other DNA
caggattcagatagaactcgcataaactcgcctgattggt

SEQ ID NO: 9942 - DNA, 40 bp, synthetic construct
  source 1..40: mol_type = other DNA
aaaggtggtcttccctgggcgagatagtggaacttgcgga

SEQ ID NO: 9943 - DNA, 40 bp, synthetic construct
  source 1..40: mol_type = other DNA
gcaggcaatcaccattcaatcactggtcctctgaaataaa

SEQ ID NO: 9944 - DNA, 40 bp, synthetic construct
  source 1..40: mol_type = other DNA
caccagaccgtctgatagcttcttcccagaacccttcata

SEQ ID NO: 9945 - DNA, 40 bp, synthetic construct
  source 1..40: mol_type = other DNA
aacagcatctgactccttttgggatgctcttcgacctcga

SEQ ID NO: 9946 - DNA, 40 bp, synthetic construct
  source 1..40: mol_type = other DNA
gtgtagtcatcgctgttctctgcccacatcatcaaaggtc

SEQ ID NO: 9947 - DNA, 40 bp, synthetic construct
  source 1..40: mol_type = other DNA
ggaattctcacaggagacgaacgctgctcgtatccgacgg

SEQ ID NO: 9948 - DNA, 40 bp, synthetic construct
  source 1..40: mol_type = other DNA
gtgcccagactgcctcgtgccccagtggacttgcagaaaa

SEQ ID NO: 9949 - DNA, 40 bp, synthetic construct
  source 1..40: mol_type = other DNA
cttgttacttcgggaagcgatcctctttagaccacatccc

SEQ ID NO: 9950 - DNA, 40 bp, synthetic construct
  source 1..40: mol_type = other DNA
ttcacagagaagctcagtaattgggcttctttctaaatcg

SEQ ID NO: 9951 - DNA, 40 bp, synthetic construct
  source 1..40: mol_type = other DNA
tagatgcctttctcttggagcaaactcactcatggctttg

SEQ ID NO: 9952 - DNA, 40 bp, synthetic construct
  source 1..40: mol_type = other DNA
tgttcaggttgaccatcacaattggtattccggttatgga

SEQ ID NO: 9953 - DNA, 40 bp, synthetic construct
  source 1..40: mol_type = other DNA
agtatgaaaaccttagtcggtgtctacagcattggctaat

SEQ ID NO: 9954 - DNA, 40 bp, synthetic construct
  source 1..40: mol_type = other DNA
actaccctaaggcaggcagtggacaggagatcctcttagc

SEQ ID NO: 9955 - DNA, 40 bp, synthetic construct
  source 1..40: mol_type = other DNA
catgacggctacgttcatgtgagaaaatgagtgacttccc

SEQ ID NO: 9956 - DNA, 40 bp, synthetic construct
  source 1..40: mol_type = other DNA
gttccttccttgtaggccattgcattcacagttcaacatg

SEQ ID NO: 9957 - DNA, 40 bp, synthetic construct
  source 1..40: mol_type = other DNA
acccaagactcagacaacctcagcttttttcaaggcatag

SEQ ID NO: 9958 - DNA, 40 bp, synthetic construct
  source 1..40: mol_type = other DNA
ctcaacgcttgtggagccttgcttgtctacctttccaagg

SEQ ID NO: 9959 - DNA, 40 bp, synthetic construct
  source 1..40: mol_type = other DNA
gggtggttattgcatctagaggcatttgtggttgggtcag

SEQ ID NO: 9960 - DNA, 40 bp, synthetic construct
  source 1..40: mol_type = other DNA
tcttattgggtcaagctggtcgcgtcggcacccaagaatt

SEQ ID NO: 9961 - DNA, 40 bp, synthetic construct
  source 1..40: mol_type = other DNA
ctgggtcctcaaaagcacagcagattggtgatgttgacat

SEQ ID NO: 9962 - DNA, 40 bp, synthetic construct
  source 1..40: mol_type = other DNA
tactagtgacgtttggcactattatctaggcacaccctgt

SEQ ID NO: 9963 - DNA, 40 bp, synthetic construct
  source 1..40: mol_type = other DNA
gctggacttcgactttctttgccttgctcttagcatctcg

SEQ ID NO: 9964 - DNA, 40 bp, synthetic construct
  source 1..40: mol_type = other DNA
atatagaaagactccaccaggtgcttttctcctttgatgt

SEQ ID NO: 9965 - DNA, 40 bp, synthetic construct
  source 1..40: mol_type = other DNA
catcagtggcaaacaccagcgcccgcgaaatggaagccgt

SEQ ID NO: 9966 - DNA, 40 bp, synthetic construct
  source 1..40: mol_type = other DNA
ggcccttttcgaacttcagggctgcagttcttcccaaagg

SEQ ID NO: 9967 - DNA, 40 bp, synthetic construct
  source 1..40: mol_type = other DNA
acctctttcaggtgagcatgctgtattcctaagagagcat

SEQ ID NO: 9968 - DNA, 40 bp, synthetic construct
  source 1..40: mol_type = other DNA
ttggacacagacacaacaggccctaagaagatagcttgct

SEQ ID NO: 9969 - DNA, 40 bp, synthetic construct
  source 1..40: mol_type = other DNA
tgactcggatagccctcccagctattttcttgcccttgta

SEQ ID NO: 9970 - DNA, 40 bp, synthetic construct
  source 1..40: mol_type = other DNA
ttgcaccggtacccaacccacactggaaatgaagtaacag

SEQ ID NO: 9971 - DNA, 40 bp, synthetic construct
  source 1..40: mol_type = other DNA
tctgtctattcataccaggtctccttccactggatagggt

SEQ ID NO: 9972 - DNA, 40 bp, synthetic construct
  source 1..40: mol_type = other DNA
cgtataccaaaggccttagtgcatcgtgttatctctgggt

SEQ ID NO: 9973 - DNA, 40 bp, synthetic construct
  source 1..40: mol_type = other DNA
caaagcgttcttgtccagatggtgtccagagagctccaca

SEQ ID NO: 9974 - DNA, 40 bp, synthetic construct
  source 1..40: mol_type = other DNA
tgtgtgggttgaatgtcaacctgttctacttcaatcctct

SEQ ID NO: 9975 - DNA, 40 bp, synthetic construct
  source 1..40: mol_type = other DNA
tccgtggaacacaactcagatgatctgctggatagcattt

SEQ ID NO: 9976 - DNA, 40 bp, synthetic construct
  source 1..40: mol_type = other DNA
gtatcatccatccattttccagcctcgtttactgtcgcag

SEQ ID NO: 9977 - DNA, 40 bp, synthetic construct
  source 1..40: mol_type = other DNA
tccagtagccatcaagatccttcattgcaatgtgctgtct

SEQ ID NO: 9978 - DNA, 40 bp, synthetic construct
  source 1..40: mol_type = other DNA
gctattacaagttcctggaaattcattctcaacgatgcca

SEQ ID NO: 9979 - DNA, 40 bp, synthetic construct
  source 1..40: mol_type = other DNA
tggtggcattttctatggtctttgaaatttgggcacctca

SEQ ID NO: 9980 - DNA, 40 bp, synthetic construct
  source 1..40: mol_type = other DNA
caccagggtgacggactggcgggaagccttcggcatcgca

SEQ ID NO: 9981 - DNA, 40 bp, synthetic construct
  source 1..40: mol_type = other DNA
ggaggccgcgctgatctcacactggctgcgtcttgaactc

SEQ ID NO: 9982 - DNA, 40 bp, synthetic construct
  source 1..40: mol_type = other DNA
cataatttccctggcaacagcagctggtattcaacagccc

SEQ ID NO: 9983 - DNA, 40 bp, synthetic construct
  source 1..40: mol_type = other DNA
acatatgaggatgggtaacacaggattctttctagctggg

SEQ ID NO: 9984 - DNA, 40 bp, synthetic construct
  source 1..40: mol_type = other DNA
tcacttagaaaacttgagggcacacctctgcttttggaaa

SEQ ID NO: 9985 - DNA, 40 bp, synthetic construct
  source 1..40: mol_type = other DNA
actcgatgcagcgcaggaagcatatctgtcagcatgttgg

SEQ ID NO: 9986 - DNA, 40 bp, synthetic construct
  source 1..40: mol_type = other DNA
gccatcaagtggccacgacatgactccgtgtcgggtgatg

SEQ ID NO: 9987 - DNA, 40 bp, synthetic construct
  source 1..40: mol_type = other DNA
gacattcaattgccatgaggagctttatctccacagacac

SEQ ID NO: 9988 - DNA, 40 bp, synthetic construct
  source 1..40: mol_type = other DNA
ctgaacaggtgtggtggcaggcacttctttgccctagtag

SEQ ID NO: 9989 - DNA, 40 bp, synthetic construct
  source 1..40: mol_type = other DNA
aagcagattccttggtaaggctgttggtggcatacttgaa

SEQ ID NO: 9990 - DNA, 40 bp, synthetic construct
  source 1..40: mol_type = other DNA
ctcttgggtttccctggattgttacagaagaccagtaagg

SEQ ID NO: 9991 - DNA, 40 bp, synthetic construct
  source 1..40: mol_type = other DNA
gttgttattgtcccacacggagccgcactgaccagatggg

SEQ ID NO: 9992 - DNA, 40 bp, synthetic construct
  source 1..40: mol_type = other DNA
tggagataagcctgaggtaggatgaagtgggtgccgtagt

SEQ ID NO: 9993 - DNA, 40 bp, synthetic construct
  source 1..40: mol_type = other DNA
tcacaacgttccaaaatccctcgaaggaagggaatgttat

SEQ ID NO: 9994 - DNA, 40 bp, synthetic construct
  source 1..40: mol_type = other DNA
acatcgcatactctgttgtgcaggatgctcctgtttaagc

SEQ ID NO: 9995 - DNA, 40 bp, synthetic construct
  source 1..40: mol_type = other DNA
catgactgccactggaatgaaacccagagaatgcagtaac

SEQ ID NO: 9996 - DNA, 40 bp, synthetic construct
  source 1..40: mol_type = other DNA
acgacgtgaaatttgatctgacctccacagtatacagaag

SEQ ID NO: 9997 - DNA, 40 bp, synthetic construct
  source 1..40: mol_type = other DNA
atttctgttccaattcctccagggtcatgttcgtaggtgt

SEQ ID NO: 9998 - DNA, 40 bp, synthetic construct
  source 1..40: mol_type = other DNA
gacgccggtcttgatgacgactgactttagtagtgaactg

SEQ ID NO: 9999 - DNA, 40 bp, synthetic construct
  source 1..40: mol_type = other DNA
agatggctttcactgaatctaggtgaaagttattcctccg

SEQ ID NO: 10000 - DNA, 40 bp, synthetic construct
  source 1..40: mol_type = other DNA
ttggaaatcatcaccacaggcattaggtaactgactgaca

SEQ ID NO: 10001 - DNA, 40 bp, synthetic construct
  source 1..40: mol_type = other DNA
ttctcactcagagaatcactaccacagaaataagctcaga

SEQ ID NO: 10002 - DNA, 40 bp, synthetic construct
  source 1..40: mol_type = other DNA
gcggtttgggtaggcaaaggtgtagcactaagacatctgg

SEQ ID NO: 10003 - DNA, 40 bp, synthetic construct
  source 1..40: mol_type = other DNA
aaagatatgcgtgttggaagaactgggtttcttggaaagt

SEQ ID NO: 10004 - DNA, 40 bp, synthetic construct
  source 1..40: mol_type = other DNA
tccttcatgcccaagactttacccactagatgcaaaaagc

SEQ ID NO: 10005 - DNA, 40 bp, synthetic construct
  source 1..40: mol_type = other DNA
gctgtgttctcacaagttcaggtcctgctcaggtgaatcg

SEQ ID NO: 10006 - DNA, 40 bp, synthetic construct
  source 1..40: mol_type = other DNA
cgtgggcaagccaagggttccaacctctatcccttttcca

SEQ ID NO: 10007 - DNA, 40 bp, synthetic construct
  source 1..40: mol_type = other DNA
cgcgatctggtaccagaaggacggaaataacctagatggg

SEQ ID NO: 10008 - DNA, 40 bp, synthetic construct
  source 1..40: mol_type = other DNA
gcaggtggatagtcccgcggagctccatgtcgatagtctt

SEQ ID NO: 10009 - DNA, 40 bp, synthetic construct
  source 1..40: mol_type = other DNA
ctttctctgcagaaatgttcttgtaagatgatagagccac

SEQ ID NO: 10010 - DNA, 40 bp, synthetic construct
  source 1..40: mol_type = other DNA
tagatcaaggcccaaatgctgtgtattgatgcagaaaagg

SEQ ID NO: 10011 - DNA, 40 bp, synthetic construct
  source 1..40: mol_type = other DNA
aaatatgggaacctaggactactagacaaagactggtctt

SEQ ID NO: 10012 - DNA, 40 bp, synthetic construct
  source 1..40: mol_type = other DNA
tttacccaaaatccttcccgactttatcgcagctctcaga

SEQ ID NO: 10013 - DNA, 40 bp, synthetic construct
  source 1..40: mol_type = other DNA
cttagcataaggcctgacatgcaccatggaattactcacc

SEQ ID NO: 10014 - DNA, 40 bp, synthetic construct
  source 1..40: mol_type = other DNA
ccattgaagatgccattgaaagacttcgagactggacaag

SEQ ID NO: 10015 - DNA, 40 bp, synthetic construct
  source 1..40: mol_type = other DNA
tccaccgtgtactcgaggccagtcttcacaggtgcattct

SEQ ID NO: 10016 - DNA, 40 bp, synthetic construct
  source 1..40: mol_type = other DNA
agcgtgaggaagaacagcaggtttaacaacagagaaacgg

SEQ ID NO: 10017 - DNA, 40 bp, synthetic construct
  source 1..40: mol_type = other DNA
gatatcgagagctgttacaatggagggagatgtcctaccg

SEQ ID NO: 10018 - DNA, 40 bp, synthetic construct
  source 1..40: mol_type = other DNA
actccacttatcgcttcttccccacctagcattgaaactg

SEQ ID NO: 10019 - DNA, 40 bp, synthetic construct
  source 1..40: mol_type = other DNA
actacatggcagggcttggctttgttgatgtcctgcgtgc

SEQ ID NO: 10020 - DNA, 40 bp, synthetic construct
  source 1..40: mol_type = other DNA
aatagtagggcgattacagaaactttatttctcgccactg

SEQ ID NO: 10021 - DNA, 40 bp, synthetic construct
  source 1..40: mol_type = other DNA
aggtgctgtagattcccatttgagagttgcatttccagaa

SEQ ID NO: 10022 - DNA, 40 bp, synthetic construct
  source 1..40: mol_type = other DNA
gttacttccaaactcttggtcctcaatgacaggagtaaag

SEQ ID NO: 10023 - DNA, 40 bp, synthetic construct
  source 1..40: mol_type = other DNA
acatttacacgtctgcggatgagtctgtgtttttgcagga

SEQ ID NO: 10024 - DNA, 40 bp, synthetic construct
  source 1..40: mol_type = other DNA
tacctgtgatctgtctttctagccggtgtcctcatccctg

SEQ ID NO: 10025 - DNA, 40 bp, synthetic construct
  source 1..40: mol_type = other DNA
taatctaccacaaagttgcgagaggctgctggtctcatag

SEQ ID NO: 10026 - DNA, 40 bp, synthetic construct
  source 1..40: mol_type = other DNA
taatcctggcaggacaaggagacaagaaactcatggcttt

SEQ ID NO: 10027 - DNA, 40 bp, synthetic construct
  source 1..40: mol_type = other DNA
caatggtctccttggaggttattggtccacgtgtagtctc

SEQ ID NO: 10028 - DNA, 40 bp, synthetic construct
  source 1..40: mol_type = other DNA
ttcacagctcagggtgaccactctgcaagagcaactttgt

SEQ ID NO: 10029 - DNA, 40 bp, synthetic construct
  source 1..40: mol_type = other DNA
gttctggtgttgttgaactttacataccatgagacacaca

SEQ ID NO: 10030 - DNA, 40 bp, synthetic construct
  source 1..40: mol_type = other DNA
atttatggtccttccagtctagggtcctttctccatttaa

SEQ ID NO: 10031 - DNA, 40 bp, synthetic construct
  source 1..40: mol_type = other DNA
ctatctaagagtagcatgcataccatggttttcccatctt

SEQ ID NO: 10032 - DNA, 40 bp, synthetic construct
  source 1..40: mol_type = other DNA
atccagtacacgttgggcctggctgttgtccgtcttattg

SEQ ID NO: 10033 - DNA, 40 bp, synthetic construct
  source 1..40: mol_type = other DNA
tagcggctgtccacgttttcacatcagggctcggttccgg

SEQ ID NO: 10034 - DNA, 40 bp, synthetic construct
  source 1..40: mol_type = other DNA
tgtgctatagaacaggctcaacgctggtcacggtcagtgc

SEQ ID NO: 10035 - DNA, 40 bp, synthetic construct
  source 1..40: mol_type = other DNA
gggtacgtgccaagcatcctgcctgggaagtatgtacacg

SEQ ID NO: 10036 - DNA, 40 bp, synthetic construct
  source 1..40: mol_type = other DNA
ggcgtggtcttgtagttgttcgtcggagtccagcacggga

SEQ ID NO: 10037 - DNA, 40 bp, synthetic construct
  source 1..40: mol_type = other DNA
accgctggtgtaatctcttctagtctcagttggcagtgtt

SEQ ID NO: 10038 - DNA, 40 bp, synthetic construct
  source 1..40: mol_type = other DNA
tttgtcttggagaatcatgcgcctttaggatctctcttct

SEQ ID NO: 10039 - DNA, 40 bp, synthetic construct
  source 1..40: mol_type = other DNA
ataaaggaaagcaggctgccccacgctctcctggtagatc

SEQ ID NO: 10040 - DNA, 40 bp, synthetic construct
  source 1..40: mol_type = other DNA
gacatggtgtaggtgaagcaggatccgcaagttgattcga

SEQ ID NO: 10041 - DNA, 40 bp, synthetic construct
  source 1..40: mol_type = other DNA
tctagtatttgcagggcactgcagagggttggcgcttaca

SEQ ID NO: 10042 - DNA, 40 bp, synthetic construct
  source 1..40: mol_type = other DNA
aggtctccctcggcccacatcttggaagaagtgcagatag

SEQ ID NO: 10043 - DNA, 40 bp, synthetic construct
  source 1..40: mol_type = other DNA
tacggaaggctatcactctggcagtccaggagagttgggt

SEQ ID NO: 10044 - DNA, 40 bp, synthetic construct
  source 1..40: mol_type = other DNA
gagcacttccctgggaatttgatacaaacttggcctatca

SEQ ID NO: 10045 - DNA, 40 bp, synthetic construct
  source 1..40: mol_type = other DNA
cattatagtgccagggtagatagcacctcagtagagctta

SEQ ID NO: 10046 - DNA, 40 bp, synthetic construct
  source 1..40: mol_type = other DNA
ttctgctggctttgtagatgtagaagttagtctgcctgat

SEQ ID NO: 10047 - DNA, 40 bp, synthetic construct
  source 1..40: mol_type = other DNA
ctttcatagaagcctgcttttcccaggcagctttttgagt

SEQ ID NO: 10048 - DNA, 40 bp, synthetic construct
  source 1..40: mol_type = other DNA
atctgtgtagacatgggtattgggatgtggttgggtgaac

SEQ ID NO: 10049 - DNA, 40 bp, synthetic construct
  source 1..40: mol_type = other DNA
aatcagagcatatgacaggtgaaaggagttgactcagata

SEQ ID NO: 10050 - DNA, 40 bp, synthetic construct
  source 1..40: mol_type = other DNA
ggtgggccgacaggaagatgggcgttgaggcgctcgtcgt

SEQ ID NO: 10051 - DNA, 40 bp, synthetic construct
  source 1..40: mol_type = other DNA
tccatagtcataggaagagccacgagtcactctcgttttc

SEQ ID NO: 10052 - DNA, 40 bp, synthetic construct
  source 1..40: mol_type = other DNA
tgcttgatgatttccaggagtgttctcaaactcacaccct

SEQ ID NO: 10053 - DNA, 40 bp, synthetic construct
  source 1..40: mol_type = other DNA
ggttccttcatggagtcatacattttcttcacggaaacag

SEQ ID NO: 10054 - DNA, 40 bp, synthetic construct
  source 1..40: mol_type = other DNA
tagcttatgggaagggagtgtctgagtttcctcgggtcta

SEQ ID NO: 10055 - DNA, 40 bp, synthetic construct
  source 1..40: mol_type = other DNA
ttgttctataagcaggagaggaattgttctggaggaacaa

SEQ ID NO: 10056 - DNA, 40 bp, synthetic construct
  source 1..40: mol_type = other DNA
agtccacttcagaaatgctgaaaatgcaaagccaccaaag

SEQ ID NO: 10057 - DNA, 40 bp, synthetic construct
  source 1..40: mol_type = other DNA
ctgcgtgagcttgttactcgtgatcttcaaaagtgcccaa

SEQ ID NO: 10058 - DNA, 40 bp, synthetic construct
  source 1..40: mol_type = other DNA
cgtgatctgtcaccacataaacaggctcggacgcacgagc

SEQ ID NO: 10059 - DNA, 40 bp, synthetic construct
  source 1..40: mol_type = other DNA
tgacggaagtacggctgcaggtccaatagtcgataacacc

SEQ ID NO: 10060 - DNA, 40 bp, synthetic construct
  source 1..40: mol_type = other DNA
acgacgcaggctggaccaagcagctgcgccctttttgtcc

SEQ ID NO: 10061 - DNA, 40 bp, synthetic construct
  source 1..40: mol_type = other DNA
gaggaggcatataggaaacgcgggatgaactggttggtcc

SEQ ID NO: 10062 - DNA, 40 bp, synthetic construct
  source 1..40: mol_type = other DNA
ttgccctagtagcgttagtagtgggcatgaaattgcgagc

SEQ ID NO: 10063 - DNA, 40 bp, synthetic construct
  source 1..40: mol_type = other DNA
agaacccgtgaaggcccaagcacctccgtcaatttgtatt

SEQ ID NO: 10064 - DNA, 40 bp, synthetic construct
  source 1..40: mol_type = other DNA
caaatgtaactagcgcctctccggagaccctaaccgtacc

SEQ ID NO: 10065 - DNA, 40 bp, synthetic construct
  source 1..40: mol_type = other DNA
tgcgccatgtcatctttcacctcgaaaaatagaccctact

SEQ ID NO: 10066 - DNA, 40 bp, synthetic construct
  source 1..40: mol_type = other DNA
ctaagcgacagcgtgaccttttagtgttctgtctcaagac

SEQ ID NO: 10067 - DNA, 40 bp, synthetic construct
  source 1..40: mol_type = other DNA
cgacaggtcacatgagcctactaatattctggaggtcagc

SEQ ID NO: 10068 - DNA, 40 bp, synthetic construct
  source 1..40: mol_type = other DNA
atccgcttctcaatggttctgccaggctttgaatcgcctc

SEQ ID NO: 10069 - DNA, 40 bp, synthetic construct
  source 1..40: mol_type = other DNA
ccgggagccaaaggaaccgccatcccaatcaaggtcacga

SEQ ID NO: 10070 - DNA, 40 bp, synthetic construct
  source 1..40: mol_type = other DNA
agatctgccgccgcggaacacagctccgcaccgcaactga

SEQ ID NO: 10071 - DNA, 40 bp, synthetic construct
  source 1..40: mol_type = other DNA
acgtgaaggagatcacgaagcaggcgcgggatgaagtcag

SEQ ID NO: 10072 - DNA, 40 bp, synthetic construct
  source 1..40: mol_type = other DNA
gcatccgtacaggaagacaaatgttttcatccatggtggc

SEQ ID NO: 10073 - DNA, 40 bp, synthetic construct
  source 1..40: mol_type = other DNA
tgttgatttctcccactcctaccattaccagaagttgcca

SEQ ID NO: 10074 - DNA, 40 bp, synthetic construct
  source 1..40: mol_type = other DNA
cccatacatttcacagtccactgtagtggtcattagtaag

SEQ ID NO: 10075 - DNA, 40 bp, synthetic construct
  source 1..40: mol_type = other DNA
ggtccagtggaaatcctgaactaaggtgctatttgggcaa

SEQ ID NO: 10076 - DNA, 40 bp, synthetic construct
  source 1..40: mol_type = other DNA
gtggactttacaaaggcacaagagctggtcaaaagtgtag

SEQ ID NO: 10077 - DNA, 40 bp, synthetic construct
  source 1..40: mol_type = other DNA
cgcagagccataagccctgccttttcaatcagatgtgccc

SEQ ID NO: 10078 - DNA, 40 bp, synthetic construct
  source 1..40: mol_type = other DNA
ccacctgagcatacacgtactgagcggttgcagtaccggg

SEQ ID NO: 10079 - DNA, 40 bp, synthetic construct
  source 1..40: mol_type = other DNA
cgttctcaccatggaacaagctaccaccttcacagatgac

SEQ ID NO: 10080 - DNA, 40 bp, synthetic construct
  source 1..40: mol_type = other DNA
cgttgaaagcatgaccattgctgagagtcatcaaactcca

SEQ ID NO: 10081 - DNA, 40 bp, synthetic construct
  source 1..40: mol_type = other DNA
ctcaaccattctactttccttcttgtgctatggatttgca

SEQ ID NO: 10082 - DNA, 40 bp, synthetic construct
  source 1..40: mol_type = other DNA
gcccttcagtggctgtggtgaaggaggcctttaccacgcg

SEQ ID NO: 10083 - DNA, 40 bp, synthetic construct
  source 1..40: mol_type = other DNA
agatagcttgcagcaacaaaccatttgcattaacttgggc

SEQ ID NO: 10084 - DNA, 40 bp, synthetic construct
  source 1..40: mol_type = other DNA
gagcagaaggaatgtttttgaccctgttttctgccgtgtt

SEQ ID NO: 10085 - DNA, 40 bp, synthetic construct
  source 1..40: mol_type = other DNA
gtaatgtcacacagagagaccctccagcatctgagtgata

SEQ ID NO: 10086 - DNA, 40 bp, synthetic construct
  source 1..40: mol_type = other DNA
cgctgtccgagagacactttgccaggctcgttcccaacag

SEQ ID NO: 10087 - DNA, 40 bp, synthetic construct
  source 1..40: mol_type = other DNA
tggtgctcaaaatccactttctctaataccgtagtggttc

SEQ ID NO: 10088 - DNA, 40 bp, synthetic construct
  source 1..40: mol_type = other DNA
gcctacaaatgatccctgtggggtctgtggcagacaccac

SEQ ID NO: 10089 - DNA, 40 bp, synthetic construct
  source 1..40: mol_type = other DNA
tcgttacgagtcacttcaggtcatgagggttggtgcaacg

SEQ ID NO: 10090 - DNA, 40 bp, synthetic construct
  source 1..40: mol_type = other DNA
gttatgaaaccgtagaggccaccaagaaatggatctgtgg

SEQ ID NO: 10091 - DNA, 40 bp, synthetic construct
  source 1..40: mol_type = other DNA
tctcggatgttggtgggaagcgtgggcgcgctgattaggc

SEQ ID NO: 10092 - DNA, 40 bp, synthetic construct
  source 1..40: mol_type = other DNA
tgtgcattttgcccaaaggcgaagcacctggccattcaga

SEQ ID NO: 10093 - DNA, 40 bp, synthetic construct
  source 1..40: mol_type = other DNA
tagagtgataggacaggactaggctatggcaaatccgaat

SEQ ID NO: 10094 - DNA, 40 bp, synthetic construct
  source 1..40: mol_type = other DNA
ctattgacactgagagaggggactcccaatgtactttcat

SEQ ID NO: 10095 - DNA, 40 bp, synthetic construct
  source 1..40: mol_type = other DNA
tctggattccacactcataggtggtcaacacttaattcgt

SEQ ID NO: 10096 - DNA, 40 bp, synthetic construct
  source 1..40: mol_type = other DNA
tggatcttctggatgtctcagcttctaatcttattcgggt

SEQ ID NO: 10097 - DNA, 40 bp, synthetic construct
  source 1..40: mol_type = other DNA
tgggtaagatccagaccctggctgagaatacactcttgaa

SEQ ID NO: 10098 - DNA, 40 bp, synthetic construct
  source 1..40: mol_type = other DNA
atggtcaccaaactgagggatgactaggatgttcccgata

SEQ ID NO: 10099 - DNA, 40 bp, synthetic construct
  source 1..40: mol_type = other DNA
tgcttcggagattgcattttatcacggatcacttcccatg

SEQ ID NO: 10100 - DNA, 40 bp, synthetic construct
  source 1..40: mol_type = other DNA
gcgggattggagaacaaactatagaagccttctccgtctg

SEQ ID NO: 10101 - DNA, 40 bp, synthetic construct
  source 1..40: mol_type = other DNA
cctgccatgagtgtgtttctccagaggatatgtaggtaat

SEQ ID NO: 10102 - DNA, 40 bp, synthetic construct
  source 1..40: mol_type = other DNA
caattatgacagtgtcgttcgtcctttcccactgtactat

SEQ ID NO: 10103 - DNA, 40 bp, synthetic construct
  source 1..40: mol_type = other DNA
ggcacgggttgcttgcaatgaggatgccaaccaccatcaa

SEQ ID NO: 10104 - DNA, 40 bp, synthetic construct
  source 1..40: mol_type = other DNA
taaggcaagaaacccatttctcatcacttgagagactggt

SEQ ID NO: 10105 - DNA, 40 bp, synthetic construct
  source 1..40: mol_type = other DNA
gtttcatcactggcagtttcgtcatttcttgtccttacca

SEQ ID NO: 10106 - DNA, 40 bp, synthetic construct
  source 1..40: mol_type = other DNA
cctttgcaccgtgagtcaggcttaacgttcgcagagtgca

SEQ ID NO: 10107 - DNA, 40 bp, synthetic construct
  source 1..40: mol_type = other DNA
cctataccatcttagccacttcttcactggtatgacagtc

SEQ ID NO: 10108 - DNA, 40 bp, synthetic construct
  source 1..40: mol_type = other DNA
ttcttgaagtggatcaacctctcttcctgaaagcaagcaa

SEQ ID NO: 10109 - DNA, 40 bp, synthetic construct
  source 1..40: mol_type = other DNA
tagccgggagaatagctaccctctcttgtttatcttggca

SEQ ID NO: 10110 - DNA, 40 bp, synthetic construct
  source 1..40: mol_type = other DNA
agaaaacttgccctgttaccctaagggctcttaaaaacgt

SEQ ID NO: 10111 - DNA, 40 bp, synthetic construct
  source 1..40: mol_type = other DNA
ggtgttccaggacgtagctgcagctttctcaactagtaca

SEQ ID NO: 10112 - DNA, 40 bp, synthetic construct
  source 1..40: mol_type = other DNA
taatcctgagtgttctttgcgtaggtctcatctgctttta

SEQ ID NO: 10113 - DNA, 40 bp, synthetic construct
  source 1..40: mol_type = other DNA
tccggatttccaaacttttgcagcctttccactgttagcg

SEQ ID NO: 10114 - DNA, 40 bp, synthetic construct
  source 1..40: mol_type = other DNA
gcggagaaatgcttgagagggtagcggcgacatctgggtg

SEQ ID NO: 10115 - DNA, 40 bp, synthetic construct
  source 1..40: mol_type = other DNA
ccattttagctccttcttgacccaccagctaaacgcactg

SEQ ID NO: 10116 - DNA, 40 bp, synthetic construct
  source 1..40: mol_type = other DNA
agccattaggaggagtgagcgcttgtttgctatttcacca

SEQ ID NO: 10117 - DNA, 40 bp, synthetic construct
  source 1..40: mol_type = other DNA
caaaccacctccacgacctccttcagaccagtaagataca

SEQ ID NO: 10118 - DNA, 40 bp, synthetic construct
  source 1..40: mol_type = other DNA
cgtcttcatgtaatcttccttgtaactcaaggtcggctat

SEQ ID NO: 10119 - DNA, 40 bp, synthetic construct
  source 1..40: mol_type = other DNA
ccctggacgtggcctgaatggtcattgatccacatgatct

SEQ ID NO: 10120 - DNA, 40 bp, synthetic construct
  source 1..40: mol_type = other DNA
tacatcgcactgaagtagttgggtggagtcctccgagctg

SEQ ID NO: 10121 - DNA, 40 bp, synthetic construct
  source 1..40: mol_type = other DNA
caccaggaaaagcttccggggattaggttagaagcgccca

SEQ ID NO: 10122 - DNA, 40 bp, synthetic construct
  source 1..40: mol_type = other DNA
cgttgtgatctccttctgaatttggatccagttgataacg

SEQ ID NO: 10123 - DNA, 40 bp, synthetic construct
  source 1..40: mol_type = other DNA
ggaaagcgcggcctcttggtcaccgtccggtctccacgct

SEQ ID NO: 10124 - DNA, 40 bp, synthetic construct
  source 1..40: mol_type = other DNA
ataaaccttcattccaggagtcgtaggtaaaagggtcaat

SEQ ID NO: 10125 - DNA, 40 bp, synthetic construct
  source 1..40: mol_type = other DNA
atgcacagtaatctggcggtgcaggtggtcgtgattcggg

SEQ ID NO: 10126 - DNA, 40 bp, synthetic construct
  source 1..40: mol_type = other DNA
ctcagtttcagcagcaatgcatcagggtgaaaaggagccc

SEQ ID NO: 10127 - DNA, 40 bp, synthetic construct
  source 1..40: mol_type = other DNA
ctcctatagctgtgaagcatgtgggtagtgcataattgtc

SEQ ID NO: 10128 - DNA, 40 bp, synthetic construct
  source 1..40: mol_type = other DNA
agtggtgaggagccgaagccaatgggagactggcatagaa

SEQ ID NO: 10129 - DNA, 40 bp, synthetic construct
  source 1..40: mol_type = other DNA
gagaacatagcaattagccctgctggcaaagtttatccat

SEQ ID NO: 10130 - DNA, 40 bp, synthetic construct
  source 1..40: mol_type = other DNA
gttccaggtgtcctgcttcctcttctcctactttgccgca

SEQ ID NO: 10131 - DNA, 40 bp, synthetic construct
  source 1..40: mol_type = other DNA
atctcatgtgcaagtgaacaagcttttggtggttgtttca

SEQ ID NO: 10132 - DNA, 40 bp, synthetic construct
  source 1..40: mol_type = other DNA
tcattcccgccaacctaatgccacagcgcaatctttagtc

SEQ ID NO: 10133 - DNA, 40 bp, synthetic construct
  source 1..40: mol_type = other DNA
taaacacttcccagaccgtggatgggcatggtgacgccac

SEQ ID NO: 10134 - DNA, 40 bp, synthetic construct
  source 1..40: mol_type = other DNA
gtcgcctagcgggtcatagcgccaccagggcacctgtatt

SEQ ID NO: 10135 - DNA, 40 bp, synthetic construct
  source 1..40: mol_type = other DNA
cggtcatttaggttctgcattttctaggtagctcgctaga

SEQ ID NO: 10136 - DNA, 40 bp, synthetic construct
  source 1..40: mol_type = other DNA
gactgtcttaatcttcctggccatccactacttcttgcac

SEQ ID NO: 10137 - DNA, 40 bp, synthetic construct
  source 1..40: mol_type = other DNA
attctgcagagcttctgtggagggattgaaggcttcgcaa

SEQ ID NO: 10138 - DNA, 40 bp, synthetic construct
  source 1..40: mol_type = other DNA
gttgagtcacaggactgttttaaaggttaccaaggcttga

SEQ ID NO: 10139 - DNA, 40 bp, synthetic construct
  source 1..40: mol_type = other DNA
catctctgttttgacaacgaaccttgaacatactgacgga

SEQ ID NO: 10140 - DNA, 40 bp, synthetic construct
  source 1..40: mol_type = other DNA
taagcatggctttccctgctacctcctgctggtttgggcg

SEQ ID NO: 10141 - DNA, 40 bp, synthetic construct
  source 1..40: mol_type = other DNA
tggcaggtccaatttctgcattgctgccaggtaaatttcc

SEQ ID NO: 10142 - DNA, 40 bp, synthetic construct
  source 1..40: mol_type = other DNA
tgtagtctgcctccaggatgcagttcctcatactctaaag

SEQ ID NO: 10143 - DNA, 40 bp, synthetic construct
  source 1..40: mol_type = other DNA
ttcagttgagcctggactgactgccaggtaacgttgttat

SEQ ID NO: 10144 - DNA, 40 bp, synthetic construct
  source 1..40: mol_type = other DNA
ggagtggaatggcactggcttggccctgaagaacctgagt

SEQ ID NO: 10145 - DNA, 40 bp, synthetic construct
  source 1..40: mol_type = other DNA
agtctccttttctccacctggaacttctctgggtagccga

SEQ ID NO: 10146 - DNA, 40 bp, synthetic construct
  source 1..40: mol_type = other DNA
gcattccttctccaccacgctcgttgttatggacgcaagg

SEQ ID NO: 10147 - DNA, 40 bp, synthetic construct
  source 1..40: mol_type = other DNA
tccgtatgtgccgttgtacattgacgaaataacaggtgtc

SEQ ID NO: 10148 - DNA, 40 bp, synthetic construct
  source 1..40: mol_type = other DNA
cacatgcttagtttgttccaggcagggacacataggcccg

SEQ ID NO: 10149 - DNA, 40 bp, synthetic construct
  source 1..40: mol_type = other DNA
gacctcagccctgagttaccctctctgacctggccgttgc

SEQ ID NO: 10150 - DNA, 40 bp, synthetic construct
  source 1..40: mol_type = other DNA
aatgtggtaacaaaggagccagcggtagggcctggcgtca

SEQ ID NO: 10151 - DNA, 40 bp, synthetic construct
  source 1..40: mol_type = other DNA
tgtggaaacaggagtggttggaggaggacagctgattagt

SEQ ID NO: 10152 - DNA, 40 bp, synthetic construct
  source 1..40: mol_type = other DNA
catgatgtgaatggctatcgctgggcactcatgactcgct

SEQ ID NO: 10153 - DNA, 40 bp, synthetic construct
  source 1..40: mol_type = other DNA
cgtggaagacatgggagctgggcgtgcggcggaggcttaa

SEQ ID NO: 10154 - DNA, 40 bp, synthetic construct
  source 1..40: mol_type = other DNA
cactttgcaatgcccacttcgaggaggcctaaaatgagcg

SEQ ID NO: 10155 - DNA, 40 bp, synthetic construct
  source 1..40: mol_type = other DNA
tgcaccaactaagttttctgttccctcctttgccaagtat

SEQ ID NO: 10156 - DNA, 40 bp, synthetic construct
  source 1..40: mol_type = other DNA
accagtcaactcctggtattttggagatctgtatccttgc

SEQ ID NO: 10157 - DNA, 40 bp, synthetic construct
  source 1..40: mol_type = other DNA
agccatctaaagcagtaggacaacattgcttccaagctaa

SEQ ID NO: 10158 - DNA, 40 bp, synthetic construct
  source 1..40: mol_type = other DNA
agatcgtcggcctctggaagaggccctgacatcacatagt

SEQ ID NO: 10159 - DNA, 40 bp, synthetic construct
  source 1..40: mol_type = other DNA
cccatatgctggatgaataagaggccatcacatgttggtc

SEQ ID NO: 10160 - DNA, 40 bp, synthetic construct
  source 1..40: mol_type = other DNA
cagcaaggtttccaactactcagaagcacatcacatacac

SEQ ID NO: 10161 - DNA, 40 bp, synthetic construct
  source 1..40: mol_type = other DNA
tttattgcaaaatgcgcctgcaatcccaccctagacagac

SEQ ID NO: 10162 - DNA, 40 bp, synthetic construct
  source 1..40: mol_type = other DNA
actcaacttcaggacttgaggccgccgtgtcgcctctcaa

SEQ ID NO: 10163 - DNA, 40 bp, synthetic construct
  source 1..40: mol_type = other DNA
aatgggcgtgtagctgtgtccccaggacgtgctgtgcttt

SEQ ID NO: 10164 - DNA, 40 bp, synthetic construct
  source 1..40: mol_type = other DNA
tacagtctgacatgagcctcatgtgcagcggctggatggg

SEQ ID NO: 10165 - DNA, 40 bp, synthetic construct
  source 1..40: mol_type = other DNA
cggctccactgtaccttggtcaagtctgcccttttgtgac

SEQ ID NO: 10166 - DNA, 40 bp, synthetic construct
  source 1..40: mol_type = other DNA
tgtctcaccctgtagcggtcttatcgtgcctggataccga

SEQ ID NO: 10167 - DNA, 40 bp, synthetic construct
  source 1..40: mol_type = other DNA
tactgggaaaagaaggagaagtctcactgcacccaaagga

SEQ ID NO: 10168 - DNA, 40 bp, synthetic construct
  source 1..40: mol_type = other DNA
ttaggctcatgatgtgaaaccggcccggacacgccttaca

SEQ ID NO: 10169 - DNA, 40 bp, synthetic construct
  source 1..40: mol_type = other DNA
gattgaatgaggccaaatcagaaagtgctgatgccatgtg

SEQ ID NO: 10170 - DNA, 40 bp, synthetic construct
  source 1..40: mol_type = other DNA
cacagacttggcaacatttgagaaatgaaagcccatggac

SEQ ID NO: 10171 - DNA, 40 bp, synthetic construct
  source 1..40: mol_type = other DNA
ctcaaggagagcagcaaaaccaacttcccttgcacgtatc

SEQ ID NO: 10172 - DNA, 40 bp, synthetic construct
  source 1..40: mol_type = other DNA
gtctcagtggaggtaggtggggagtaggagaaactttttg

SEQ ID NO: 10173 - DNA, 40 bp, synthetic construct
  source 1..40: mol_type = other DNA
taggagtctgcacttggttcgctgtgtatttcaagagcat

SEQ ID NO: 10174 - DNA, 40 bp, synthetic construct
  source 1..40: mol_type = other DNA
tctcagtcggtcaagaattcagaacagggatgatgttggg

SEQ ID NO: 10175 - DNA, 40 bp, synthetic construct
  source 1..40: mol_type = other DNA
caacagcagtatctagagcggtagctacacagaaagacat

SEQ ID NO: 10176 - DNA, 40 bp, synthetic construct
  source 1..40: mol_type = other DNA
gacatcggctaatacatagctccagaggctcaacactaaa

SEQ ID NO: 10177 - DNA, 40 bp, synthetic construct
  source 1..40: mol_type = other DNA
atagccgtatgctgccaggcccaaattcatagcggattcc

SEQ ID NO: 10178 - DNA, 40 bp, synthetic construct
  source 1..40: mol_type = other DNA
cattctgtttaaaacccaccgtctatcactgctacatagg

SEQ ID NO: 10179 - DNA, 40 bp, synthetic construct
  source 1..40: mol_type = other DNA
tctactggtaaaccttcccacacatcaacctagcaaggat

SEQ ID NO: 10180 - DNA, 40 bp, synthetic construct
  source 1..40: mol_type = other DNA
gcggtagcaacactggcgagccatgcaagaagagccaagg

SEQ ID NO: 10181 - DNA, 40 bp, synthetic construct
  source 1..40: mol_type = other DNA
acaccgtggcaaatcagtagaggtggcgagtaaaagctgc

SEQ ID NO: 10182 - DNA, 40 bp, synthetic construct
  source 1..40: mol_type = other DNA
agtcaaagccgtcaacggcacaaggccttgcaaaactcag

SEQ ID NO: 10183 - DNA, 40 bp, synthetic construct
  source 1..40: mol_type = other DNA
tgctggttaaaggactgtttctgcatcttttaactggctg

SEQ ID NO: 10184 - DNA, 40 bp, synthetic construct
  source 1..40: mol_type = other DNA
agctggcagaagttaatcctactgattaggaaatggtctg

SEQ ID NO: 10185 - DNA, 40 bp, synthetic construct
  source 1..40: mol_type = other DNA
ggtagcatttctcagctcagacctggttcttcatggctgc

SEQ ID NO: 10186 - DNA, 40 bp, synthetic construct
  source 1..40: mol_type = other DNA
tgtgttctgttacacagcatcctacacagtttactttggc

SEQ ID NO: 10187 - DNA, 40 bp, synthetic construct
  source 1..40: mol_type = other DNA
gatacaattctaccagcaaggttcccaacatcaatgcaca

SEQ ID NO: 10188 - DNA, 40 bp, synthetic construct
  source 1..40: mol_type = other DNA
ttgctgtacggtgttacagaactccaatacagacgtatag

SEQ ID NO: 10189 - DNA, 40 bp, synthetic construct
  source 1..40: mol_type = other DNA
gcctcatgttatcccttttctggaggtaccacatgcagca

SEQ ID NO: 10190 - DNA, 40 bp, synthetic construct
  source 1..40: mol_type = other DNA
tgatcttcaccagaccattccgcctcgtcttccgccacct

SEQ ID NO: 10191 - DNA, 40 bp, synthetic construct
  source 1..40: mol_type = other DNA
gcgccgcaagttcaggtggcgacgcatgcgcgcctttttc

SEQ ID NO: 10192 - DNA, 40 bp, synthetic construct
  source 1..40: mol_type = other DNA
tctggacaacagtaacttctggctcactcatccctctacg

SEQ ID NO: 10193 - DNA, 40 bp, synthetic construct
  source 1..40: mol_type = other DNA
tgggtcacgttgccttcagggcatgtccacaaagttctcc

SEQ ID NO: 10194 - DNA, 40 bp, synthetic construct
  source 1..40: mol_type = other DNA
ttgtggtgggttgtgcttgaactgaaaatgcacttgcttg

SEQ ID NO: 10195 - DNA, 40 bp, synthetic construct
  source 1..40: mol_type = other DNA
cggaaaaatcaagtcttctgggagtgtggagaaaaaggga

SEQ ID NO: 10196 - DNA, 40 bp, synthetic construct
  source 1..40: mol_type = other DNA
tctttcgccacgcccaggcatggtgtccgctttgccgtcc

SEQ ID NO: 10197 - DNA, 40 bp, synthetic construct
  source 1..40: mol_type = other DNA
ccttgatgcattcagaaaagccattggcaagttctcgtac

SEQ ID NO: 10198 - DNA, 40 bp, synthetic construct
  source 1..40: mol_type = other DNA
gtagtggcctgggtagtagggtgcagtcaatgttgggtgg

SEQ ID NO: 10199 - DNA, 40 bp, synthetic construct
  source 1..40: mol_type = other DNA
caggaactccacgccttcctttcttgacgttgttgactgg

SEQ ID NO: 10200 - DNA, 40 bp, synthetic construct
  source 1..40: mol_type = other DNA
ttctggcaacttggagctatgtttgttgtgatgagtgacc

SEQ ID NO: 10201 - DNA, 40 bp, synthetic construct
  source 1..40: mol_type = other DNA
tgccaaatggacaggttcaatgcgcttaaatgtatcccga

SEQ ID NO: 10202 - DNA, 40 bp, synthetic construct
  source 1..40: mol_type = other DNA
gtcttgtgtactgctggctaaatgtacttgttgccttgca

SEQ ID NO: 10203 - DNA, 40 bp, synthetic construct
  source 1..40: mol_type = other DNA
gcgaccttctgatatctgtccttccacatctgtagttctt

SEQ ID NO: 10204 - DNA, 40 bp, synthetic construct
  source 1..40: mol_type = other DNA
tcggttgttgaggctatcgctggaccgaggagccctcaca

SEQ ID NO: 10205 - DNA, 40 bp, synthetic construct
  source 1..40: mol_type = other DNA
ctccattgtggttgaagcagcgtgttctcacaccggtgct

SEQ ID NO: 10206 - DNA, 40 bp, synthetic construct
  source 1..40: mol_type = other DNA
caactgcttgattcgaggacgaatgtgtcctgctaaatga

SEQ ID NO: 10207 - DNA, 40 bp, synthetic construct
  source 1..40: mol_type = other DNA
ccgctttagtgatctctttggaatggcttctaggcaaccc

SEQ ID NO: 10208 - DNA, 40 bp, synthetic construct
  source 1..40: mol_type = other DNA
atccttgccaccatgtagccatgtatcgtggactagcaga

SEQ ID NO: 10209 - DNA, 40 bp, synthetic construct
  source 1..40: mol_type = other DNA
agtgtttttcttcggcctctcaagttatagacacagccaa

SEQ ID NO: 10210 - DNA, 40 bp, synthetic construct
  source 1..40: mol_type = other DNA
tctgttggcacaatggtccatcagatccatacatcagaac

SEQ ID NO: 10211 - DNA, 40 bp, synthetic construct
  source 1..40: mol_type = other DNA
ccattccttggcaatccttacagctgactctgcataaaaa

SEQ ID NO: 10212 - DNA, 40 bp, synthetic construct
  source 1..40: mol_type = other DNA
accatagaaaacaccaaacctcccgatctggcaatacagg

SEQ ID NO: 10213 - DNA, 40 bp, synthetic construct
  source 1..40: mol_type = other DNA
aatccagatgccgtgaatttcatttcggaaaaggattagg

SEQ ID NO: 10214 - DNA, 40 bp, synthetic construct
  source 1..40: mol_type = other DNA
gacaccgtagtggatgttgtacgaaggccttggcaaaacg

SEQ ID NO: 10215 - DNA, 40 bp, synthetic construct
  source 1..40: mol_type = other DNA
atataagccatgagtgggaacaccgagatgctcagagata

SEQ ID NO: 10216 - DNA, 40 bp, synthetic construct
  source 1..40: mol_type = other DNA
atctacattctggacaagacccaggcctcttacggaaccc

SEQ ID NO: 10217 - DNA, 40 bp, synthetic construct
  source 1..40: mol_type = other DNA
gggccaccgtttccgagccattcaaactaggctacattgg

SEQ ID NO: 10218 - DNA, 40 bp, synthetic construct
  source 1..40: mol_type = other DNA
gtcaagggtggatagctgatctgtcgaccaaatgcacaag

SEQ ID NO: 10219 - DNA, 40 bp, synthetic construct
  source 1..40: mol_type = other DNA
gattggtttggattctttcgtcttactgcgtcctttagag

SEQ ID NO: 10220 - DNA, 40 bp, synthetic construct
  source 1..40: mol_type = other DNA
cccggaggtatctgagcgaaactagcagtttccggaagtc

SEQ ID NO: 10221 - DNA, 40 bp, synthetic construct
  source 1..40: mol_type = other DNA
cgtcatctccttcattgcgaaccagctagatctttgtcca

SEQ ID NO: 10222 - DNA, 40 bp, synthetic construct
  source 1..40: mol_type = other DNA
ttccgaaaatctccagatgttagcaagagaaagcaaagcg

SEQ ID NO: 10223 - DNA, 40 bp, synthetic construct
  source 1..40: mol_type = other DNA
ttcctccacaaagagccaccccatcaagggaatgtttagt

SEQ ID NO: 10224 - DNA, 40 bp, synthetic construct
  source 1..40: mol_type = other DNA
agaaaagaggaatgtgtgtgcccgaacctttggcagtaac

SEQ ID NO: 10225 - DNA, 40 bp, synthetic construct
  source 1..40: mol_type = other DNA
tcaagtttggcagacaggtttgcttagacatgactgtggt

SEQ ID NO: 10226 - DNA, 40 bp, synthetic construct
  source 1..40: mol_type = other DNA
gcctcttgcaactgacatccgcctttcctgttgtagcaaa

SEQ ID NO: 10227 - DNA, 40 bp, synthetic construct
  source 1..40: mol_type = other DNA
gtgcaaagcctaactcattgacgcttctccttccttacaa

SEQ ID NO: 10228 - DNA, 40 bp, synthetic construct
  source 1..40: mol_type = other DNA
tcatcatcttcctgcaagtcgacgattcacatcgccgtta

SEQ ID NO: 10229 - DNA, 40 bp, synthetic construct
  source 1..40: mol_type = other DNA
accctggaaattaacccatcaggagagaccgtaatgtctg

SEQ ID NO: 10230 - DNA, 40 bp, synthetic construct
  source 1..40: mol_type = other DNA
taatgcctttgatgaagagggatcagtgttcctgaggtgc

SEQ ID NO: 10231 - DNA, 40 bp, synthetic construct
  source 1..40: mol_type = other DNA
tcgcgcctactgggtgtctgtaaaatgggacgcatttgcc

SEQ ID NO: 10232 - DNA, 40 bp, synthetic construct
  source 1..40: mol_type = other DNA
ggatgctcgttctgcccattccttcaggtaggcgaagaca

SEQ ID NO: 10233 - DNA, 40 bp, synthetic construct
  source 1..40: mol_type = other DNA
gcttcacacgtgtgactctcgatggatatgcaacgacact

SEQ ID NO: 10234 - DNA, 40 bp, synthetic construct
  source 1..40: mol_type = other DNA
atgcatttggcagtctagatgcatggatggagtcctattt

SEQ ID NO: 10235 - DNA, 40 bp, synthetic construct
  source 1..40: mol_type = other DNA
agtcgctcaggttcacggaccggcgctcactgcttgtccg

SEQ ID NO: 10236 - DNA, 40 bp, synthetic construct
  source 1..40: mol_type = other DNA
caaagcgactcaactccttaccttactcccttctatacca

SEQ ID NO: 10237 - DNA, 40 bp, synthetic construct
  source 1..40: mol_type = other DNA
atggattccttcactgctgccgaactttgctgatgggatg

SEQ ID NO: 10238 - DNA, 40 bp, synthetic construct
  source 1..40: mol_type = other DNA
ttgtcgtccatgttcaccagtggagtaatgcttcacaatg

SEQ ID NO: 10239 - DNA, 40 bp, synthetic construct
  source 1..40: mol_type = other DNA
taagacagtgcctgggagtaatgatgcatgtcagatgcct

SEQ ID NO: 10240 - DNA, 40 bp, synthetic construct
  source 1..40: mol_type = other DNA
cttggcccactcaacgagaatcgcagaaagctgggatgta

SEQ ID NO: 10241 - DNA, 40 bp, synthetic construct
  source 1..40: mol_type = other DNA
ggccttttcattgttttccattaaggataactaccttggg

SEQ ID NO: 10242 - DNA, 40 bp, synthetic construct
  source 1..40: mol_type = other DNA
acggctgcaccgagtcgtagctcctcgtcgcagtagaaat

SEQ ID NO: 10243 - DNA, 40 bp, synthetic construct
  source 1..40: mol_type = other DNA
taaccctgttcccaagattggtcagaccttcagtatacag

SEQ ID NO: 10244 - DNA, 40 bp, synthetic construct
  source 1..40: mol_type = other DNA
ggtagctttgcaggacctggagactgttgagagagtaggg

SEQ ID NO: 10245 - DNA, 40 bp, synthetic construct
  source 1..40: mol_type = other DNA
attggccttgacgatgttccctgcagtcgtagatggtgaa

SEQ ID NO: 10246 - DNA, 40 bp, synthetic construct
  source 1..40: mol_type = other DNA
gagcagtggatgattctgtccgcccagggactcgttgacc

SEQ ID NO: 10247 - DNA, 40 bp, synthetic construct
  source 1..40: mol_type = other DNA
cgaggaatacgcctgcgtgtctcgggaccgccgaatcctg

SEQ ID NO: 10248 - DNA, 40 bp, synthetic construct
  source 1..40: mol_type = other DNA
tcaaaagctcgtcagctgggggacggttattgtgccatct

SEQ ID NO: 10249 - DNA, 40 bp, synthetic construct
  source 1..40: mol_type = other DNA
aagtacctgcatttctgcaatctcctctttcatatcctcc

SEQ ID NO: 10250 - DNA, 40 bp, synthetic construct
  source 1..40: mol_type = other DNA
ccgtcattttgctgttcctgccttgtttccacgtcctttc

SEQ ID NO: 10251 - DNA, 40 bp, synthetic construct
  source 1..40: mol_type = other DNA
tcatttgggccactgttgctcacggccaaaatttccaatc

SEQ ID NO: 10252 - DNA, 40 bp, synthetic construct
  source 1..40: mol_type = other DNA
tcagaaatcaaggctccagactgcaacatccgtttccaaa

SEQ ID NO: 10253 - DNA, 40 bp, synthetic construct
  source 1..40: mol_type = other DNA
gaaggagaaagctcctcatcttgctgtatacaacacagtg

SEQ ID NO: 10254 - DNA, 40 bp, synthetic construct
  source 1..40: mol_type = other DNA
acatgtttagggtcgttgccggaatggataagacctggta

SEQ ID NO: 10255 - DNA, 40 bp, synthetic construct
  source 1..40: mol_type = other DNA
tccttatagttgttcactgcgggttacaattacgggctct

SEQ ID NO: 10256 - DNA, 40 bp, synthetic construct
  source 1..40: mol_type = other DNA
attctgttgattaagctgggttcctggtactacttaaacc

SEQ ID NO: 10257 - DNA, 40 bp, synthetic construct
  source 1..40: mol_type = other DNA
tagttgtagtggatggtggttgcaggaactgttacacatg

SEQ ID NO: 10258 - DNA, 40 bp, synthetic construct
  source 1..40: mol_type = other DNA
aggtctgaaaatgtttcctggatccactcacagtttccat

SEQ ID NO: 10259 - DNA, 40 bp, synthetic construct
  source 1..40: mol_type = other DNA
cagtgtactgctcaacgagcgtggtcttcaagtccgatgg

SEQ ID NO: 10260 - DNA, 40 bp, synthetic construct
  source 1..40: mol_type = other DNA
ctgactttctgctcttgtctgaagcgaaaattccatggga

SEQ ID NO: 10261 - DNA, 40 bp, synthetic construct
  source 1..40: mol_type = other DNA
tctgtggttcagctcaactgtggtgaacatcagcaaaccg

SEQ ID NO: 10262 - DNA, 40 bp, synthetic construct
  source 1..40: mol_type = other DNA
gcctagcctcttttaacagcggaggaggattataacttag

SEQ ID NO: 10263 - DNA, 40 bp, synthetic construct
  source 1..40: mol_type = other DNA
actacgactttgacggacaccatcacctttgatgggaagt

SEQ ID NO: 10264 - DNA, 40 bp, synthetic construct
  source 1..40: mol_type = other DNA
accagaaatcttgctgaagttcctttagagttcagctcta

SEQ ID NO: 10265 - DNA, 40 bp, synthetic construct
  source 1..40: mol_type = other DNA
gctgcgtgtcggaggcgtctctttctactccgcaagaaca

SEQ ID NO: 10266 - DNA, 40 bp, synthetic construct
  source 1..40: mol_type = other DNA
ggtcctacactagtgaggatagcactttatccacagcggc

SEQ ID NO: 10267 - DNA, 40 bp, synthetic construct
  source 1..40: mol_type = other DNA
accgcaacttgcaggtgagctgagacaaatcagctcatag

SEQ ID NO: 10268 - DNA, 40 bp, synthetic construct
  source 1..40: mol_type = other DNA
aactcgagtcacccgtgttatgtggccgagggtacgacac

SEQ ID NO: 10269 - DNA, 40 bp, synthetic construct
  source 1..40: mol_type = other DNA
atgtttgtttctttgctgccgttgcaggaggtgcttacgc

SEQ ID NO: 10270 - DNA, 40 bp, synthetic construct
  source 1..40: mol_type = other DNA
attgacatcatggagaaggatgttaaacctaactgtccga

SEQ ID NO: 10271 - DNA, 40 bp, synthetic construct
  source 1..40: mol_type = other DNA
ggaacttgaggacagagtgtcccttcaagatacctataga

SEQ ID NO: 10272 - DNA, 40 bp, synthetic construct
  source 1..40: mol_type = other DNA
acgaggagggaacgcgctgttggccgtggctaccatctca

SEQ ID NO: 10273 - DNA, 40 bp, synthetic construct
  source 1..40: mol_type = other DNA
cgtcaagtacactgaaattcgagaccgtcctggcgcgatg

SEQ ID NO: 10274 - DNA, 40 bp, synthetic construct
  source 1..40: mol_type = other DNA
gtagaaaagggaactgaacagtatgtctcgtggtaggact

SEQ ID NO: 10275 - DNA, 40 bp, synthetic construct
  source 1..40: mol_type = other DNA
acttccatgaggtgttttctctcctgatgtgcatatccgt

SEQ ID NO: 10276 - DNA, 40 bp, synthetic construct
  source 1..40: mol_type = other DNA
tatggtgccatcatgcatgaggaacatggaagtcaacgtt

SEQ ID NO: 10277 - DNA, 40 bp, synthetic construct
  source 1..40: mol_type = other DNA
cgcctcaaggaactgacgcttgcgtgtgctagcgtactcc

SEQ ID NO: 10278 - DNA, 40 bp, synthetic construct
  source 1..40: mol_type = other DNA
ttagaaatggaagatggcctgacgtatcaatgaatatgcc

SEQ ID NO: 10279 - DNA, 40 bp, synthetic construct
  source 1..40: mol_type = other DNA
agtattattgtcaccgtggccacagctcaagacgctggaa

SEQ ID NO: 10280 - DNA, 40 bp, synthetic construct
  source 1..40: mol_type = other DNA
ggtgcgtgtttgttaaactcggtgactgttcttgacactg

SEQ ID NO: 10281 - DNA, 40 bp, synthetic construct
  source 1..40: mol_type = other DNA
gggatgctgtgaaagaaggttctcaggctcaccagatgag

SEQ ID NO: 10282 - DNA, 40 bp, synthetic construct
  source 1..40: mol_type = other DNA
ggagactgcacctgatggaattttctccatcaacaaccag

SEQ ID NO: 10283 - DNA, 40 bp, synthetic construct
  source 1..40: mol_type = other DNA
gtcagaatgcctatctgcccggaatacagagcggaggtcg

SEQ ID NO: 10284 - DNA, 40 bp, synthetic construct
  source 1..40: mol_type = other DNA
gcagtacagaaagtatcacagtggtaggaatgttccaccc

SEQ ID NO: 10285 - DNA, 40 bp, synthetic construct
  source 1..40: mol_type = other DNA
caatactctgtgaagctgggccatcatcaacaccttccac

SEQ ID NO: 10286 - DNA, 40 bp, synthetic construct
  source 1..40: mol_type = other DNA
ctgagagattcatgctgattaggcctcacacacaatgtgt

SEQ ID NO: 10287 - DNA, 40 bp, synthetic construct
  source 1..40: mol_type = other DNA
ggatatccagtgccttatcccagatcttccgagacaggac

SEQ ID NO: 10288 - DNA, 40 bp, synthetic construct
  source 1..40: mol_type = other DNA
tcgagtcatgtacacaacccctccaagcccagattcagat

SEQ ID NO: 10289 - DNA, 40 bp, synthetic construct
  source 1..40: mol_type = other DNA
atccatcaagtttccataggggtctgcaatctcacctacc

SEQ ID NO: 10290 - DNA, 40 bp, synthetic construct
  source 1..40: mol_type = other DNA
cgattcaaaagccagatgccacatctcaaacaagagtcct

SEQ ID NO: 10291 - DNA, 40 bp, synthetic construct
  source 1..40: mol_type = other DNA
aggtttttacccagcacggccggagtgcgcgacgattcta

SEQ ID NO: 10292 - DNA, 40 bp, synthetic construct
  source 1..40: mol_type = other DNA
tttggagatcgtgaagtcaagaaaaataggctggattgga

SEQ ID NO: 10293 - DNA, 40 bp, synthetic construct
  source 1..40: mol_type = other DNA
agatgctaatacagcagcccggctgatgatacggccgagc

SEQ ID NO: 10294 - DNA, 40 bp, synthetic construct
  source 1..40: mol_type = other DNA
attccaccaggtcacctcctcctcaagtaaaccgtttcat

SEQ ID NO: 10295 - DNA, 40 bp, synthetic construct
  source 1..40: mol_type = other DNA
gatatagcttggctctgtatatgcacttgagatcttcact

SEQ ID NO: 10296 - DNA, 40 bp, synthetic construct
  source 1..40: mol_type = other DNA
tgcagacagagcactgaagtgtgtttgcccagttattgct

SEQ ID NO: 10297 - DNA, 40 bp, synthetic construct
  source 1..40: mol_type = other DNA
attcccttccacatggattagctctcattcgtggtcagat

SEQ ID NO: 10298 - DNA, 40 bp, synthetic construct
  source 1..40: mol_type = other DNA
tgatgctacatctgtggagtatgagggttgtcaatgagct

SEQ ID NO: 10299 - DNA, 40 bp, synthetic construct
  source 1..40: mol_type = other DNA
tgttgttctcgtccctgacagggtgagtgcgatcttttcc

SEQ ID NO: 10300 - DNA, 40 bp, synthetic construct
  source 1..40: mol_type = other DNA
caagtcctagtgctaaactgcaaggactgcaaatcctagg

SEQ ID NO: 10301 - DNA, 40 bp, synthetic construct
  source 1..40: mol_type = other DNA
atttggagttcaggtagggtaaagtgaagggacatatgag

SEQ ID NO: 10302 - DNA, 40 bp, synthetic construct
  source 1..40: mol_type = other DNA
ggctcaagtcctcgactgctctctcaccaaataactgcat

SEQ ID NO: 10303 - DNA, 40 bp, synthetic construct
  source 1..40: mol_type = other DNA
tgcacatgtggaggaattagtgctggcaaatgggatctag

SEQ ID NO: 10304 - DNA, 40 bp, synthetic construct
  source 1..40: mol_type = other DNA
cactcctgacttgacactgtgcctacaagtcagtggtgtg

SEQ ID NO: 10305 - DNA, 40 bp, synthetic construct
  source 1..40: mol_type = other DNA
gttcccaggagaattacggctcccaggtcaatagagttat

SEQ ID NO: 10306 - DNA, 40 bp, synthetic construct
  source 1..40: mol_type = other DNA
ccatggtacacactctgaatgtgattctcatgcatagtgt

SEQ ID NO: 10307 - DNA, 40 bp, synthetic construct
  source 1..40: mol_type = other DNA
gcacacgagtgcctgccatggtgggtgtaaccacagactc

SEQ ID NO: 10308 - DNA, 40 bp, synthetic construct
  source 1..40: mol_type = other DNA
agagagagttgacttacagaataaggcaatggcttacact

SEQ ID NO: 10309 - DNA, 40 bp, synthetic construct
  source 1..40: mol_type = other DNA
ggaatgcagagtaacagagttatcagaggtacactttcca

SEQ ID NO: 10310 - DNA, 40 bp, synthetic construct
  source 1..40: mol_type = other DNA
cgaggacataaacagggtgtgtcccttgccaaaattaact

SEQ ID NO: 10311 - DNA, 40 bp, synthetic construct
  source 1..40: mol_type = other DNA
cacatgaaaactgacacaggcatgcctccaaaaggcgggt

SEQ ID NO: 10312 - DNA, 40 bp, synthetic construct
  source 1..40: mol_type = other DNA
agtacctcagttgcagcctataccatagaaaccgggttaa

SEQ ID NO: 10313 - DNA, 40 bp, synthetic construct
  source 1..40: mol_type = other DNA
agcagttttcctgttcatctcactccagcactatagttgt

SEQ ID NO: 10314 - DNA, 40 bp, synthetic construct
  source 1..40: mol_type = other DNA
ctgccaaagaccaagttctcactgacttgtgaggtcactt

SEQ ID NO: 10315 - DNA, 40 bp, synthetic construct
  source 1..40: mol_type = other DNA
cgggttttgacctcctgaaatggtttgggctgtctttatt

SEQ ID NO: 10316 - DNA, 40 bp, synthetic construct
  source 1..40: mol_type = other DNA
gaatcgccattgctttaagtaaggacgcctgagaaatacg

SEQ ID NO: 10317 - DNA, 40 bp, synthetic construct
  source 1..40: mol_type = other DNA
cccgtctatttcaaagaaactttggagaggagattactgt

SEQ ID NO: 10318 - DNA, 40 bp, synthetic construct
  source 1..40: mol_type = other DNA
acatagagtgtagcagggcaaaagctctaggtggctgata

SEQ ID NO: 10319 - DNA, 40 bp, synthetic construct
  source 1..40: mol_type = other DNA
gataagctaagctctcctgctccaaacttgtgccttgtta

SEQ ID NO: 10320 - DNA, 40 bp, synthetic construct
  source 1..40: mol_type = other DNA
ctttctattccctgtcctaccctacaccctggtgtaacct

SEQ ID NO: 10321 - DNA, 40 bp, synthetic construct
  source 1..40: mol_type = other DNA
gatgctcatgcactggtatgctgctcactgtgcatataaa

SEQ ID NO: 10322 - DNA, 40 bp, synthetic construct
  source 1..40: mol_type = other DNA
gactccaaggatcatgctttacaccaagcaagttccacct

SEQ ID NO: 10323 - DNA, 40 bp, synthetic construct
  source 1..40: mol_type = other DNA
agctgaagagagttcaagatagcatggtagtgatcaccaa

SEQ ID NO: 10324 - DNA, 40 bp, synthetic construct
  source 1..40: mol_type = other DNA
ctaagacctcatgcatggaaaatcctgaatcttgagctga

SEQ ID NO: 10325 - DNA, 40 bp, synthetic construct
  source 1..40: mol_type = other DNA
tgttggcttttatccctatcgggtgatgttattagggtga

SEQ ID NO: 10326 - DNA, 40 bp, synthetic construct
  source 1..40: mol_type = other DNA
ttatgcgaccctttaaggttaagaaatggagtaagtcacc

SEQ ID NO: 10327 - DNA, 40 bp, synthetic construct
  source 1..40: mol_type = other DNA
tagaatcattgtgtgttggctgaggcatagcagtctctcc

SEQ ID NO: 10328 - DNA, 40 bp, synthetic construct
  source 1..40: mol_type = other DNA
tcacgaagtggtctttgatcgcaagattgaagaggagact

SEQ ID NO: 10329 - DNA, 40 bp, synthetic construct
  source 1..40: mol_type = other DNA
gctagactatcctctcattaagtccaatacgctagggcag

SEQ ID NO: 10330 - DNA, 40 bp, synthetic construct
  source 1..40: mol_type = other DNA
tgctctgaagacttgcagtgaattactctgaacctgacgg

SEQ ID NO: 10331 - DNA, 40 bp, synthetic construct
  source 1..40: mol_type = other DNA
gctactagttcccgcagccaccacgggagccaatgaggaa

SEQ ID NO: 10332 - DNA, 40 bp, synthetic construct
  source 1..40: mol_type = other DNA
atgacttctcatctgccaacgaaaactggtttagcgccac

SEQ ID NO: 10333 - DNA, 40 bp, synthetic construct
  source 1..40: mol_type = other DNA
tacagccctagatgtgaccaataccgctccacctaaagct

SEQ ID NO: 10334 - DNA, 40 bp, synthetic construct
  source 1..40: mol_type = other DNA
tatgctcatgacttcaactccaaagcatacatgggctaat

SEQ ID NO: 10335 - DNA, 40 bp, synthetic construct
  source 1..40: mol_type = other DNA
atcagctcccaaaatcttctcctcccattaggcttgcttg

SEQ ID NO: 10336 - DNA, 40 bp, synthetic construct
  source 1..40: mol_type = other DNA
ttgtcagcttttgttggttgcatccacatggcaggtgaat

SEQ ID NO: 10337 - DNA, 40 bp, synthetic construct
  source 1..40: mol_type = other DNA
ggcaagactccatccattccgagaggtcagagtactgtaa

SEQ ID NO: 10338 - DNA, 40 bp, synthetic construct
  source 1..40: mol_type = other DNA
tgctgtgtgagttcagatactgtttcttgagtggatggtt

SEQ ID NO: 10339 - DNA, 40 bp, synthetic construct
  source 1..40: mol_type = other DNA
taatctttacagacggttccagctcacctggtgggccgga

SEQ ID NO: 10340 - DNA, 40 bp, synthetic construct
  source 1..40: mol_type = other DNA
accagaatgtccaaggtcgacatcaccaaggtatttagtc

SEQ ID NO: 10341 - DNA, 40 bp, synthetic construct
  source 1..40: mol_type = other DNA
caccttccagcaagattcccgcttcattcctgattccagc

SEQ ID NO: 10342 - DNA, 40 bp, synthetic construct
  source 1..40: mol_type = other DNA
cagagcaaccaaaaggacccctggttgaacctattctcaa

SEQ ID NO: 10343 - DNA, 40 bp, synthetic construct
  source 1..40: mol_type = other DNA
gtcatgccatcttccaaggagtctgtgttcttgaccctat

SEQ ID NO: 10344 - DNA, 40 bp, synthetic construct
  source 1..40: mol_type = other DNA
cgttttgtgggcaccgtaactagttgctttgctgagattc

SEQ ID NO: 10345 - DNA, 40 bp, synthetic construct
  source 1..40: mol_type = other DNA
aacgttgcctcccagcacacaccacttttgtaaccatcac

SEQ ID NO: 10346 - DNA, 40 bp, synthetic construct
  source 1..40: mol_type = other DNA
gacattctggactgattgctgttgctgcagataattggtt

SEQ ID NO: 10347 - DNA, 40 bp, synthetic construct
  source 1..40: mol_type = other DNA
acgtgtatgagcctgatggtaagtttattgagagcctcct

SEQ ID NO: 10348 - DNA, 40 bp, synthetic construct
  source 1..40: mol_type = other DNA
actagagtgcctgtaccttagtagctcaacttgggcttag

SEQ ID NO: 10349 - DNA, 40 bp, synthetic construct
  source 1..40: mol_type = other DNA
atgagtcaagttagtcacagtagagacaactggcaatagt

SEQ ID NO: 10350 - DNA, 40 bp, synthetic construct
  source 1..40: mol_type = other DNA
gtaaaatctgcctgtacttctgctccacaccaaatgccat

SEQ ID NO: 10351 - DNA, 40 bp, synthetic construct
  source 1..40: mol_type = other DNA
cgacacctccctgttataaagccacgcgtctgatcccaaa

SEQ ID NO: 10352 - DNA, 40 bp, synthetic construct
  source 1..40: mol_type = other DNA
taaacagtgacgcaaatgccgataatgaagaccttagccc

SEQ ID NO: 10353 - DNA, 40 bp, synthetic construct
  source 1..40: mol_type = other DNA
ccaatgcctgatcctcttctaaccacaaacacgtcataca

SEQ ID NO: 10354 - DNA, 40 bp, synthetic construct
  source 1..40: mol_type = other DNA
tactgcagctattttctagcctaaaaaggaccacaggttt

SEQ ID NO: 10355 - DNA, 40 bp, synthetic construct
  source 1..40: mol_type = other DNA
taactcttgtatctgatggccaggacgtggatatgaagcc

SEQ ID NO: 10356 - DNA, 40 bp, synthetic construct
  source 1..40: mol_type = other DNA
cgttgtgacagaaatcatacttaaggtggcagaagtgaat

SEQ ID NO: 10357 - DNA, 40 bp, synthetic construct
  source 1..40: mol_type = other DNA
ggtgcaataagtgttggcaaggagaggttgaaatatacac

SEQ ID NO: 10358 - DNA, 40 bp, synthetic construct
  source 1..40: mol_type = other DNA
atatggaaagcagatgcagtatgctcatagctacttggac

SEQ ID NO: 10359 - DNA, 40 bp, synthetic construct
  source 1..40: mol_type = other DNA
gctattgaggtagacagaagtgtgatgtgagtgtgagatt

SEQ ID NO: 10360 - DNA, 40 bp, synthetic construct
  source 1..40: mol_type = other DNA
gtggctaacatttctttagggtgcctaagaggtattcaag

SEQ ID NO: 10361 - DNA, 40 bp, synthetic construct
  source 1..40: mol_type = other DNA
ttgttgaatagcatccactggagccacagcctctggcaag

SEQ ID NO: 10362 - DNA, 40 bp, synthetic construct
  source 1..40: mol_type = other DNA
ggagttcggtttcctgggtttgtgtgtggagcattaccta

SEQ ID NO: 10363 - DNA, 40 bp, synthetic construct
  source 1..40: mol_type = other DNA
atgggtctttgccatggaccgccacacttgtattcatggc

SEQ ID NO: 10364 - DNA, 40 bp, synthetic construct
  source 1..40: mol_type = other DNA
ccaagctaggagagttctttggtttcttcctgaccggatc

SEQ ID NO: 10365 - DNA, 40 bp, synthetic construct
  source 1..40: mol_type = other DNA
atgactaccagtcagttagcgttacacgtgctcaatacat

SEQ ID NO: 10366 - DNA, 40 bp, synthetic construct
  source 1..40: mol_type = other DNA
ttcagaagttgcagaatgagatatctgatgtactctggtg

SEQ ID NO: 10367 - DNA, 40 bp, synthetic construct
  source 1..40: mol_type = other DNA
ttacaaggcctctataagaccaagattagccaggagttgg

SEQ ID NO: 10368 - DNA, 40 bp, synthetic construct
  source 1..40: mol_type = other DNA
gaaggatgtcctgtttctagaattgctgggacaaagcctt

SEQ ID NO: 10369 - DNA, 40 bp, synthetic construct
  source 1..40: mol_type = other DNA
gattttgtggttcctgtcccttcccattgatccacttatg

SEQ ID NO: 10370 - DNA, 40 bp, synthetic construct
  source 1..40: mol_type = other DNA
gctctatcgcaagactatttaagcattaggacaatcggta

SEQ ID NO: 10371 - DNA, 40 bp, synthetic construct
  source 1..40: mol_type = other DNA
ttccgtagcgcccgcgtctgcgtgaactctgaccttagct

SEQ ID NO: 10372 - DNA, 40 bp, synthetic construct
  source 1..40: mol_type = other DNA
atgcctttctctgttccgacaccttgtcaccttaaccttt

SEQ ID NO: 10373 - DNA, 40 bp, synthetic construct
  source 1..40: mol_type = other DNA
aaacactgcttccactaatgattacttacccgagtccttc

SEQ ID NO: 10374 - DNA, 40 bp, synthetic construct
  source 1..40: mol_type = other DNA
tgaggcataatgttccctgaatttttgtctctggtgcacg

SEQ ID NO: 10375 - DNA, 40 bp, synthetic construct
  source 1..40: mol_type = other DNA
ctggcattctctaaggatcttgagatgtgtcctttactgc

SEQ ID NO: 10376 - DNA, 40 bp, synthetic construct
  source 1..40: mol_type = other DNA
ggacaaggctccgtaagtatcgcaaaggctgtatattaca

SEQ ID NO: 10377 - DNA, 40 bp, synthetic construct
  source 1..40: mol_type = other DNA
tggttggccctaaatcaagccttcagagttgacagatacc

SEQ ID NO: 10378 - DNA, 40 bp, synthetic construct
  source 1..40: mol_type = other DNA
gtggaactataagatgggatattccaggtggttctctttt

SEQ ID NO: 10379 - DNA, 40 bp, synthetic construct
  source 1..40: mol_type = other DNA
caaaacaactctgggacacacatgctgctcctttgggtga

SEQ ID NO: 10380 - DNA, 40 bp, synthetic construct
  source 1..40: mol_type = other DNA
gcttttcagtcagcttgcagtattcctttcaagcccaagg

SEQ ID NO: 10381 - DNA, 40 bp, synthetic construct
  source 1..40: mol_type = other DNA
gggatagacagcttgggctgtcaccctcttctcccagaac

SEQ ID NO: 10382 - DNA, 40 bp, synthetic construct
  source 1..40: mol_type = other DNA
gatgcgttcctaggattcttggaaaacctttgtcaaccaa

SEQ ID NO: 10383 - DNA, 40 bp, synthetic construct
  source 1..40: mol_type = other DNA
ttcaagtataacctggtccagctagaatgaccctctaaag

SEQ ID NO: 10384 - DNA, 40 bp, synthetic construct
  source 1..40: mol_type = other DNA
gacacagcctagacagcctgtcctacacctcaggaaatag

SEQ ID NO: 10385 - DNA, 40 bp, synthetic construct
  source 1..40: mol_type = other DNA
tcatgaggactataccttcattatgaagacactaatcccg

SEQ ID NO: 10386 - DNA, 40 bp, synthetic construct
  source 1..40: mol_type = other DNA
tgatgggaaaagctgacttttcattgatgggtccctaata

SEQ ID NO: 10387 - DNA, 40 bp, synthetic construct
  source 1..40: mol_type = other DNA
gcgtgaggcccagaccttaagagcttcagagcaacataat

SEQ ID NO: 10388 - DNA, 40 bp, synthetic construct
  source 1..40: mol_type = other DNA
ggaaagaacggtctgttcaagtgacacaaacacataatgg

SEQ ID NO: 10389 - DNA, 40 bp, synthetic construct
  source 1..40: mol_type = other DNA
gagagagtttctacggatgagctcaatattatggcctcat

SEQ ID NO: 10390 - DNA, 40 bp, synthetic construct
  source 1..40: mol_type = other DNA
gcagttgcggaactactctatccgctcaggactgcatcac

SEQ ID NO: 10391 - DNA, 40 bp, synthetic construct
  source 1..40: mol_type = other DNA
acattacaccacggtggctatttgtggtttttacgtggca

SEQ ID NO: 10392 - DNA, 40 bp, synthetic construct
  source 1..40: mol_type = other DNA
tatccatgaatagagacagcaatagagacttgcacccgaa

SEQ ID NO: 10393 - DNA, 40 bp, synthetic construct
  source 1..40: mol_type = other DNA
cgttagccacatagcacttgtcacttattgcttatgcctg

SEQ ID NO: 10394 - DNA, 40 bp, synthetic construct
  source 1..40: mol_type = other DNA
caagtgccactgctacaacaggagaggtaccaattctgga

SEQ ID NO: 10395 - DNA, 40 bp, synthetic construct
  source 1..40: mol_type = other DNA
taattaccctctgctgaaactaacagcattgctggcaccc

SEQ ID NO: 10396 - DNA, 40 bp, synthetic construct
  source 1..40: mol_type = other DNA
cgccaatccaaagaaaggaaatggccgtaagtgcggtggc

SEQ ID NO: 10397 - DNA, 40 bp, synthetic construct
  source 1..40: mol_type = other DNA
cagaaggtgttgctctgaggcacaggtagacttcactccc

SEQ ID NO: 10398 - DNA, 40 bp, synthetic construct
  source 1..40: mol_type = other DNA
atgtagtggaatgatagtggtactgcaggtaccagtatga

SEQ ID NO: 10399 - DNA, 40 bp, synthetic construct
  source 1..40: mol_type = other DNA
agccctgataacccttgctccctgtcaacccttcctcatg

SEQ ID NO: 10400 - DNA, 40 bp, synthetic construct
  source 1..40: mol_type = other DNA
aattctctggattaccaggttcgtggacaaaatccaggag

SEQ ID NO: 10401 - DNA, 40 bp, synthetic construct
  source 1..40: mol_type = other DNA
gggaagatgcacagctgcttggatccacattgacatatgt

SEQ ID NO: 10402 - DNA, 40 bp, synthetic construct
  source 1..40: mol_type = other DNA
tacaaggccctgagttatctcagactcttaaaaagtggcc

SEQ ID NO: 10403 - DNA, 40 bp, synthetic construct
  source 1..40: mol_type = other DNA
tgaagcctaaacacctgtgactgaaccaccatgatcatta

SEQ ID NO: 10404 - DNA, 40 bp, synthetic construct
  source 1..40: mol_type = other DNA
actttgaaggaagtctgagcgcccaatccctgaaaagttc

SEQ ID NO: 10405 - DNA, 40 bp, synthetic construct
  source 1..40: mol_type = other DNA
cctagactcaatcactgcctgagctgtccaggattaactg

SEQ ID NO: 10406 - DNA, 40 bp, synthetic construct
  source 1..40: mol_type = other DNA
acggaccagaccatgctgacaaatgaggttaggattaggc

SEQ ID NO: 10407 - DNA, 40 bp, synthetic construct
  source 1..40: mol_type = other DNA
acaactttggccttggaaaagtcatatgattggctcatac

SEQ ID NO: 10408 - DNA, 40 bp, synthetic construct
  source 1..40: mol_type = other DNA
acagtaggaagatctggctgaagggacaaatcataacgct

SEQ ID NO: 10409 - DNA, 40 bp, synthetic construct
  source 1..40: mol_type = other DNA
ttgtcttgtgatggagttctttgtagaaaacctctcgtct

SEQ ID NO: 10410 - DNA, 40 bp, synthetic construct
  source 1..40: mol_type = other DNA
cacgtagtaaatgcccagtagtgtttagagcaagacctag

SEQ ID NO: 10411 - DNA, 40 bp, synthetic construct
  source 1..40: mol_type = other DNA
tacgacagaaaagtgacctgaaacaacgagtaccttgtgc

SEQ ID NO: 10412 - DNA, 40 bp, synthetic construct
  source 1..40: mol_type = other DNA
gctaactcttttcataacccacggatgcgtgagcaaaggt

SEQ ID NO: 10413 - DNA, 40 bp, synthetic construct
  source 1..40: mol_type = other DNA
tcgcaaaaggttgtctagaaatacagttctcctatcaagg

SEQ ID NO: 10414 - DNA, 40 bp, synthetic construct
  source 1..40: mol_type = other DNA
cggaccttgggctacttaaacagcgagcaggtgtacgccc

SEQ ID NO: 10415 - DNA, 40 bp, synthetic construct
  source 1..40: mol_type = other DNA
aagccgtcatgttagaggcgcgatcttgccacgattgcct

SEQ ID NO: 10416 - DNA, 40 bp, synthetic construct
  source 1..40: mol_type = other DNA
aagacgcgatagataggcctgaaggttcgaaaccagtaaa

SEQ ID NO: 10417 - DNA, 40 bp, synthetic construct
  source 1..40: mol_type = other DNA
tcgagcagttaaccaggcaagcgagcgtcgcagattaact

SEQ ID NO: 10418 - DNA, 40 bp, synthetic construct
  source 1..40: mol_type = other DNA
gataactattcacccagcgcggttgcgatctatattcgga

SEQ ID NO: 10419 - DNA, 40 bp, synthetic construct
  source 1..40: mol_type = other DNA
tcggcgtgcgcattttcgtgtcaacgcaggtcgctcacga

SEQ ID NO: 10420 - DNA, 40 bp, synthetic construct
  source 1..40: mol_type = other DNA
ctagagcgacaccaacatcgtgcgaggtggaaaagtcaca

SEQ ID NO: 10421 - DNA, 40 bp, synthetic construct
  source 1..40: mol_type = other DNA
agataggcctaagtgggcctaaccagtaaaaagacgcgat

SEQ ID NO: 10422 - DNA, 40 bp, synthetic construct
  source 1..40: mol_type = other DNA
ggaacgtattccgccgcacaactagtcggaggtctaattt

SEQ ID NO: 10423 - DNA, 40 bp, synthetic construct
  source 1..40: mol_type = other DNA
gttaattggccctgtaccttataggagcgaccgattacgt

SEQ ID NO: 10424 - DNA, 40 bp, synthetic construct
  source 1..40: mol_type = other DNA
agcagatttacgttgagggccaggtcgcagataaatgtgg

SEQ ID NO: 10425 - DNA, 40 bp, synthetic construct
  source 1..40: mol_type = other DNA
aaccctcgtaatagggctgccgctggtgccacacgactac

SEQ ID NO: 10426 - DNA, 40 bp, synthetic construct
  source 1..40: mol_type = other DNA
cgtggtatcgggtggttgtggacagtattgtgcttgacgt

SEQ ID NO: 10427 - DNA, 40 bp, synthetic construct
  source 1..40: mol_type = other DNA
ggagatgaactaccacgcttgctaactcttttcataaccc

SEQ ID NO: 10428 - DNA, 40 bp, synthetic construct
  source 1..40: mol_type = other DNA
tacagttctcctatcaaggtgtattcgttttgagcgctga

SEQ ID NO: 10429 - DNA, 40 bp, synthetic construct
  source 1..40: mol_type = other DNA
aaaaagacgcgatagataggtcagaaggttcgaaaccagt

SEQ ID NO: 10430 - DNA, 40 bp, synthetic construct
  source 1..40: mol_type = other DNA
atacggaacttcgcaaaagttggacgcgcatgattgagtt

SEQ ID NO: 10431 - DNA, 40 bp, synthetic construct; identical to SEQ ID NO: 10411
  source 1..40: mol_type = other DNA

SEQ ID NO: 10432 - DNA, 40 bp, synthetic construct; identical to SEQ ID NO: 10412
  source 1..40: mol_type = other DNA

SEQ ID NO: 10433 - DNA, 40 bp, synthetic construct; identical to SEQ ID NO: 10413
  source 1..40: mol_type = other DNA

SEQ ID NO: 10434 - DNA, 40 bp, synthetic construct; identical to SEQ ID NO: 10414
  source 1..40: mol_type = other DNA

SEQ ID NO: 10435 - DNA, 40 bp, synthetic construct; identical to SEQ ID NO: 10415
  source 1..40: mol_type = other DNA

SEQ ID NO: 10436 - DNA, 40 bp, synthetic construct; identical to SEQ ID NO: 10416
  source 1..40: mol_type = other DNA

SEQ ID NO: 10437 - DNA, 40 bp, synthetic construct; identical to SEQ ID NO: 10417
  source 1..40: mol_type = other DNA

SEQ ID NO: 10438 - DNA, 40 bp, synthetic construct; identical to SEQ ID NO: 10418
  source 1..40: mol_type = other DNA

SEQ ID NO: 10439 - DNA, 40 bp, synthetic construct; identical to SEQ ID NO: 10419
  source 1..40: mol_type = other DNA

SEQ ID NO: 10440 - DNA, 40 bp, synthetic construct; identical to SEQ ID NO: 10420
  source 1..40: mol_type = other DNA

SEQ ID NO: 10441 - DNA, 40 bp, synthetic construct
  source 1..40: mol_type = other DNA
gcgacatatctagcaaaacaaagaactcgtaagtaagccg

SEQ ID NO: 10442 - DNA, 40 bp, synthetic construct
  source 1..40: mol_type = other DNA
cgttgggcgctgtccaaggtactgctagggactggtaaaa

SEQ ID NO: 10443 - DNA, 40 bp, synthetic construct
  source 1..40: mol_type = other DNA
ggcatttcgcattcttaggaatcactgaattgcgggaatc

SEQ ID NO: 10444 - DNA, 40 bp, synthetic construct
  source 1..40: mol_type = other DNA
tcggcttcatcgggacgccgcattcctattgttttcccga

SEQ ID NO: 10445 - DNA, 40 bp, synthetic construct
  source 1..40: mol_type = other DNA
acggcgtattaaggtcgtaccgggtgaccaatgaccatat

SEQ ID NO: 10446 - DNA, 40 bp, synthetic construct
  source 1..40: mol_type = other DNA
gtaaaacgttgggcgctgtcgacgcgactgctagggactg

SEQ ID NO: 10447 - DNA, 40 bp, synthetic construct
  source 1..40: mol_type = other DNA
ttggcatccctaaacaacgagctcttcgacgttatagata

SEQ ID NO: 10448 - DNA, 40 bp, synthetic construct
  source 1..40: mol_type = other DNA
ggttaccgtaatacttcagagtccgggttattatcgtcgc

SEQ ID NO: 10449 - DNA, 40 bp, synthetic construct
  source 1..40: mol_type = other DNA
cgtcactctgtatgtccgtgtcataccgaagcaattctgt

SEQ ID NO: 10450 - DNA, 40 bp, synthetic construct
  source 1..40: mol_type = other DNA
tgatcagtcaactcaagcgatgggctcgattgatggatac

SEQ ID NO: 10451 - DNA, 40 bp, synthetic construct; identical to SEQ ID NO: 10411
  source 1..40: mol_type = other DNA

SEQ ID NO: 10452 - DNA, 40 bp, synthetic construct; identical to SEQ ID NO: 10412
  source 1..40: mol_type = other DNA

SEQ ID NO: 10453 - DNA, 40 bp, synthetic construct; identical to SEQ ID NO: 10413
  source 1..40: mol_type = other DNA

SEQ ID NO: 10454 - DNA, 40 bp, synthetic construct; identical to SEQ ID NO: 10414
  source 1..40: mol_type = other DNA

SEQ ID NO: 10455 - DNA, 40 bp, synthetic construct; identical to SEQ ID NO: 10415
  source 1..40: mol_type = other DNA

SEQ ID NO: 10456 - DNA, 40 bp, synthetic construct; identical to SEQ ID NO: 10416
  source 1..40: mol_type = other DNA

SEQ ID NO: 10457 - DNA, 40 bp, synthetic construct; identical to SEQ ID NO: 10417
  source 1..40: mol_type = other DNA

SEQ ID NO: 10458 - DNA, 40 bp, synthetic construct; identical to SEQ ID NO: 10418
  source 1..40: mol_type = other DNA

SEQ ID NO: 10459 - DNA, 40 bp, synthetic construct; identical to SEQ ID NO: 10419
  source 1..40: mol_type = other DNA

SEQ ID NO: 10460 - DNA, 40 bp, synthetic construct; identical to SEQ ID NO: 10420
  source 1..40: mol_type = other DNA

SEQ ID NO: 10461 - DNA, 40 bp, synthetic construct
  source 1..40: mol_type = other DNA
cagcgcgtgtcgtaaaaaaaaagctactggtcggacccat

SEQ ID NO: 10462 - DNA, 40 bp, synthetic construct
  source 1..40: mol_type = other DNA
tagcctaaaggttcttgcagagagagaggttaataaggcc

SEQ ID NO: 10463 - DNA, 40 bp, synthetic construct
  source 1..40: mol_type = other DNA
tgaccatatacggcgtattaatcgtaactcgggtgaccaa

SEQ ID NO: 10464 - DNA, 40 bp, synthetic construct
  source 1..40: mol_type = other DNA
tagacccaaacccgactagtccatatgagggcgctgagca

SEQ ID NO: 10465 - DNA, 40 bp, synthetic construct
  source 1..40: mol_type = other DNA
tgcggatctttaggttgacccgtactgtaggcggcccaaa

SEQ ID NO: 10466 - DNA, 40 bp, synthetic construct
  source 1..40: mol_type = other DNA
agcctaaaggttcttgcagagagagaggttaataaggcct

SEQ ID NO: 10467 - DNA, 40 bp, synthetic construct
  source 1..40: mol_type = other DNA
taagcggttaccacaggcgcgcttgtacgatgtgtttgca

SEQ ID NO: 10468 - DNA, 40 bp, synthetic construct
  source 1..40: mol_type = other DNA
ccaattagcagagtgtcagggtcgttaagagggaaatcgc

SEQ ID NO: 10469 - DNA, 40 bp, synthetic construct
  source 1..40: mol_type = other DNA
cattggcggtgacttgagactccgcgagttccgcccaata

SEQ ID NO: 10470 - DNA, 40 bp, synthetic construct
  source 1..40: mol_type = other DNA
tgatacgcccgggactacggtgtagagggcctaacgagtt

SEQ ID NO: 10471 - DNA, 40 bp, synthetic construct; identical to SEQ ID NO: 10411
  source 1..40: mol_type = other DNA

SEQ ID NO: 10472 - DNA, 40 bp, synthetic construct; identical to SEQ ID NO: 10412
  source 1..40: mol_type = other DNA

SEQ ID NO: 10473 - DNA, 40 bp, synthetic construct; identical to SEQ ID NO: 10413
  source 1..40: mol_type = other DNA

SEQ ID NO: 10474 - DNA, 40 bp, synthetic construct; identical to SEQ ID NO: 10414
  source 1..40: mol_type = other DNA

SEQ ID NO: 10475 - DNA, 40 bp, synthetic construct; identical to SEQ ID NO: 10415
  source 1..40: mol_type = other DNA

SEQ ID NO: 10476 - DNA, 40 bp, synthetic construct; identical to SEQ ID NO: 10416
  source 1..40: mol_type = other DNA

SEQ ID NO: 10477 - DNA, 40 bp, synthetic construct; identical to SEQ ID NO: 10417
  source 1..40: mol_type = other DNA

SEQ ID NO: 10478 - DNA, 40 bp, synthetic construct; identical to SEQ ID NO: 10418
  source 1..40: mol_type = other DNA

SEQ ID NO: 10479 - DNA, 40 bp, synthetic construct; identical to SEQ ID NO: 10419
  source 1..40: mol_type = other DNA

SEQ ID NO: 10480 - DNA, 40 bp, synthetic construct; identical to SEQ ID NO: 10420
  source 1..40: mol_type = other DNA

SEQ ID NO: 10481 - DNA, 40 bp, synthetic construct
  source 1..40: mol_type = other DNA
gttatcttccgcgagttccgaataaacacaaagccgcgta

SEQ ID NO: 10482 - DNA, 40 bp, synthetic construct
  source 1..40: mol_type = other DNA
ttgattgtatcacttcgcgaagcaggagcatatgttgctc

SEQ ID NO: 10483 - DNA, 40 bp, synthetic construct
  source 1..40: mol_type = other DNA
catccaatcacggaatcaagatgcatcattcgctgaggga

SEQ ID NO: 10484 - DNA, 40 bp, synthetic construct
  source 1..40: mol_type = other DNA
tcaagtccgaatctctagatcccgaagctctaactgcatt

SEQ ID NO: 10485 - DNA, 40 bp, synthetic construct
  source 1..40: mol_type = other DNA
tagacggcatctcacagtcacgtgcgattcgtgccactcg

SEQ ID NO: 10486 - DNA, 40 bp, synthetic construct
  source 1..40: mol_type = other DNA
tcagtcctatagcgaggccagaggacaaatgcggtctgat

SEQ ID NO: 10487 - DNA, 40 bp, synthetic construct
  source 1..40: mol_type = other DNA
gacgcattcctgcatcaataggacttctcggaacggtcct

SEQ ID NO: 10488 - DNA, 40 bp, synthetic construct
  source 1..40: mol_type = other DNA
gggttctgtcgaatttgctcgtggtagaaatatgctgcag

SEQ ID NO: 10489 - DNA, 40 bp, synthetic construct
  source 1..40: mol_type = other DNA
acaggccgctaaagacgttctcgcaacggttgttaatatg

SEQ ID NO: 10490 - DNA, 40 bp, synthetic construct
  source 1..40: mol_type = other DNA
aaagacgttctactccgccatgttaatatgacaggccgct

SEQ ID NO: 10491 - DNA, 40 bp, synthetic construct; identical to SEQ ID NO: 10411
  source 1..40: mol_type = other DNA

SEQ ID NO: 10492 - DNA, 40 bp, synthetic construct; identical to SEQ ID NO: 10412
  source 1..40: mol_type = other DNA

SEQ ID NO: 10493 - DNA, 40 bp, synthetic construct; identical to SEQ ID NO: 10413
  source 1..40: mol_type = other DNA

SEQ ID NO: 10494 - DNA, 40 bp, synthetic construct; identical to SEQ ID NO: 10414
  source 1..40: mol_type = other DNA

SEQ ID NO: 10495 - DNA, 40 bp, synthetic construct; identical to SEQ ID NO: 10415
  source 1..40: mol_type = other DNA

SEQ ID NO: 10496 - DNA, 40 bp, synthetic construct; identical to SEQ ID NO: 10416
  source 1..40: mol_type = other DNA

SEQ ID NO: 10497 - DNA, 40 bp, synthetic construct; identical to SEQ ID NO: 10417
  source 1..40: mol_type = other DNA

SEQ ID NO: 10498 - DNA, 40 bp, synthetic construct; identical to SEQ ID NO: 10418
  source 1..40: mol_type = other DNA

SEQ ID NO: 10499 - DNA, 40 bp, synthetic construct; identical to SEQ ID NO: 10419
  source 1..40: mol_type = other DNA

SEQ ID NO: 10500 - DNA, 40 bp, synthetic construct; identical to SEQ ID NO: 10420
  source 1..40: mol_type = other DNA

SEQ ID NO: 10501 - DNA, 40 bp, synthetic construct
  source 1..40: mol_type = other DNA
cgcattcttaggatctaaacaattgcgggaatcggcattt

SEQ ID NO: 10502 - DNA, 40 bp, synthetic construct
  source 1..40: mol_type = other DNA
tgccatacagttaggtgctaagcgcacttctgcataacta

SEQ ID NO: 10503 - DNA, 40 bp, synthetic construct
  source 1..40: mol_type = other DNA
ccctgaagcagtgagcgtggatggtcggtcattgccgcaa

SEQ ID NO: 10504 - DNA, 40 bp, synthetic construct
  source 1..40: mol_type = other DNA
agggcgagcgtcgcagattacccttcgatgcatccgaatg

SEQ ID NO: 10505 - DNA, 40 bp, synthetic construct
  source 1..40: mol_type = other DNA
ccagattatctcgcggtggactacttaggagttgtggata

SEQ ID NO: 10506 - DNA, 40 bp, synthetic construct
  source 1..40: mol_type = other DNA
tcgtttacgaaacaggtcgcgagttaacggagacccgcca

SEQ ID NO: 10507 - DNA, 40 bp, synthetic construct
  source 1..40: mol_type = other DNA
ggcctaacgagtttgatacgggatgcccaagattgtagag

SEQ ID NO: 10508 - DNA, 40 bp, synthetic construct
  source 1..40: mol_type = other DNA
taaaggcccgtgccgccggagtgttcagacgtcgttctac

SEQ ID NO: 10509 - DNA, 40 bp, synthetic construct
  source 1..40: mol_type = other DNA
ggttggttcctcttgaagcgtcgtaaagtaggcgagcgtt

SEQ ID NO: 10510 - DNA, 40 bp, synthetic construct
  source 1..40: mol_type = other DNA
gtttgataagcgtgttctagttaacaacccgcgggccgaa

SEQ ID NO: 10511 - DNA, 40 bp, synthetic construct; identical to SEQ ID NO: 10411
  source 1..40: mol_type = other DNA

SEQ ID NO: 10512 - DNA, 40 bp, synthetic construct; identical to SEQ ID NO: 10412
  source 1..40: mol_type = other DNA

SEQ ID NO: 10513 - DNA, 40 bp, synthetic construct; identical to SEQ ID NO: 10413
  source 1..40: mol_type = other DNA

SEQ ID NO: 10514 - DNA, 40 bp, synthetic construct; identical to SEQ ID NO: 10414
  source 1..40: mol_type = other DNA

SEQ ID NO: 10515 - DNA, 40 bp, synthetic construct; identical to SEQ ID NO: 10415
  source 1..40: mol_type = other DNA

SEQ ID NO: 10516 - DNA, 40 bp, synthetic construct; identical to SEQ ID NO: 10416
  source 1..40: mol_type = other DNA

SEQ ID NO: 10517 - DNA, 40 bp, synthetic construct; identical to SEQ ID NO: 10417
  source 1..40: mol_type = other DNA

SEQ ID NO: 10518 - DNA, 40 bp, synthetic construct; identical to SEQ ID NO: 10418
  source 1..40: mol_type = other DNA

SEQ ID NO: 10519 - DNA, 40 bp, synthetic construct; identical to SEQ ID NO: 10419
  source 1..40: mol_type = other DNA

SEQ ID NO: 10520 - DNA, 40 bp, synthetic construct; identical to SEQ ID NO: 10420
  source 1..40: mol_type = other DNA

SEQ ID NO: 10521 - DNA, 40 bp, synthetic construct
  source 1..40: mol_type = other DNA
cttccgcgagttccgcccaaacacaaagccgcgtagttat

SEQ ID NO: 10522 - DNA, 40 bp, synthetic construct
  source 1..40: mol_type = other DNA
ggacttgcagctcgtaacgcaggcaagagtttgtgggcgc

SEQ ID NO: 10523 - DNA, 40 bp, synthetic construct
  source 1..40: mol_type = other DNA
gtacagcacgtacgttatatatttccgttagagccgagtg

SEQ ID NO: 10524 - DNA, 40 bp, synthetic construct
  source 1..40: mol_type = other DNA
ccaactaggtggacaaacctccggcagcgttccgttacat

SEQ ID NO: 10525 - DNA, 40 bp, synthetic construct
  source 1..40: mol_type = other DNA
atgtgctcgcttgcccatcactcagagataacgcatatct

SEQ ID NO: 10526 - DNA, 40 bp, synthetic construct
  source 1..40: mol_type = other DNA
gcctaacgagtttgatacgcgatgcccaagattgtagagg

SEQ ID NO: 10527 - DNA, 40 bp, synthetic construct
  source 1..40: mol_type = other DNA
tacgatgtgtttgcataagcggcggaagtgaacacgcttg

SEQ ID NO: 10528 - DNA, 40 bp, synthetic construct
  source 1..40: mol_type = other DNA
agtagaaaacgagatagggtgttgggacgcttgaagcgca

SEQ ID NO: 10529 - DNA, 40 bp, synthetic construct
  source 1..40: mol_type = other DNA
gggatacttggtcaaagctctctcgccttagatccggcgg

SEQ ID NO: 10530 - DNA, 40 bp, synthetic construct
  source 1..40: mol_type = other DNA
gccattgccacgaggttctcttagggcggtagagagaatt

SEQ ID NO: 10531 - DNA, 48 bp, synthetic construct
  source 1..48: mol_type = other DNA
ccacaggaagtaaagcacactctttccctacacgacgctcttccgatc

SEQ ID NO: 10532 - DNA, 48 bp, synthetic construct
  source 1..48: mol_type = other DNA
ccacaggaagtaaagccacaacgggagctgtggaattggttcacctgg

SEQ ID NO: 10533 - DNA, 48 bp, synthetic construct
  source 1..48: mol_type = other DNA
ccacaggaagtaaagcgtatgatggtgttgcggcttctcgcttaacgc

SEQ ID NO: 10534 - DNA, 48 bp, synthetic construct
  source 1..48: mol_type = other DNA
ccacaggaagtaaagctgttgcatctccacccggattgagccttcagc

SEQ ID NO: 10535 - DNA, 48 bp, synthetic construct
  source 1..48: mol_type = other DNA
ccacaggaagtaaagctggactaagactcgtcctccagcggacctaag

SEQ ID NO: 10536 - DNA, 48 bp, synthetic construct
  source 1..48: mol_type = other DNA
ccacaggaagtaaagctcggcgttgtctgctatcgttcttggcactcc

SEQ ID NO: 10537 - DNA, 32 bp, synthetic construct
  source 1..32: mol_type = other DNA
acactctttccctacacgacgctcttccgatc

SEQ ID NO: 10538 - DNA, 32 bp, synthetic construct
  source 1..32: mol_type = other DNA
tcggcgttgtctgctatcgttcttggcactcc

SEQ ID NO: 10539 - DNA, 32 bp, synthetic construct
  source 1..32: mol_type = other DNA
cacaacgggagctgtggaattggttcacctgg

SEQ ID NO: 10540 - DNA, 32 bp, synthetic construct
  source 1..32: mol_type = other DNA
tgttgcatctccacccggattgagccttcagc

SEQ ID NO: 10541 - DNA, 32 bp, synthetic construct
  source 1..32: mol_type = other DNA
tggactaagactcgtcctccagcggacctaag

SEQ ID NO: 10542 - DNA, 32 bp, synthetic construct
  source 1..32: mol_type = other DNA
tacgacacactcgggctctatgggcttcatgg

SEQ ID NO: 10543 - DNA, 32 bp, synthetic construct
  source 1..32: mol_type = other DNA
gtatgatggtgttgcggcttctcgcttaacgc

SEQ ID NO: 10544 - DNA, 32 bp, synthetic construct
  source 1..32: mol_type = other DNA
tcttgagtcattcgcagggcatgtgccagacc
